(19) United States
(12) Patent Application Publication
(10) Pub. No.: US 2007/0059722 A1
(43) Pub. Date: Mar. 15, 2007

(54) Novel genes and markers associated to type 2 diabetes mellitus

(75) Inventors: Jukka T. Salonen, Kuopio (FI); Juha-Matti Aalto, Siilinjarvi (FI); Ricardo Fuentes, Kuopio (FI); Outi Kontkanen, Kuopio (FI); Mia Pirskanen, Kuopio (FI); Pekka Uimari, Kuopio (FI)

Correspondence Address: BIRCH STEWART KOLASCH & BIRCH, PO BOX 747, FALLS CHURCH, VA, 22040-0747, US

(73) Assignee: Oy Jurilab Ltd, Kuopio (FI)

(21) Appl. No.: 11/325,330

(22) Filed: Jan. 5, 2006

(30) Foreign Application Priority Data
Jan. 5, 2005 (FI) 20050011
Dec. 23, 2005 (WO) PCT/FI05/50486

(51) Int. Cl. C12Q 1/68; G06F 19/00

(52) U.S. Cl. 435/6; 702/20

(57) ABSTRACT

Genes, SNP markers and haplotypes of susceptibility or predisposition to T2D and subdiagnosis of T2D are disclosed. Methods for diagnosis, prediction of clinical course and efficacy of treatments for T2D using polymorphisms in the T2D risk genes are also disclosed. The genes, gene products and agents of the invention are also useful for monitoring the effectiveness of prevention and treatment of T2D. Kits are also provided for the diagnosis, selecting treatment and assessing prognosis of T2D.

### BACKGROUND OF THE INVENTION

[0001] 1. Field of the Invention

[0002] The present invention relates generally to the field of diagnosis of diabetes mellitus (DM). More particularly, it provides a method of diagnosing or detecting a predisposition or propensity or susceptibility for type 2 diabetes mellitus (T2D). Specifically, the invention is directed to a method that comprises the steps of providing a biological sample of the subject to be tested and detecting the presence or absence of one or several genomic single nucleotide polymorphism (SNP) markers in the biological sample. Furthermore, the invention utilises both genetic and phenotypic information as well as information obtained by questionnaires to construct a score that provides the probability of developing T2D. In addition, the invention provides a kit to perform the method. The kit can be used to set an etiology-based diagnosis of T2D for targeting of treatment and preventive interventions, such as dietary advice as well as stratification of the subject in clinical trials testing drugs and other interventions. The kit can also be used for the prediction of clinical course and efficacy of treatments for T2D.

[0003] 2. Description of Related Art

[0004] Public Health Significance of T2D

[0005] The term diabetes mellitus (DM) (ICD/10 codes E10-E14) describes several syndromes of abnormal carbohydrate metabolism that are characterized by hyperglycemia. It is associated with a relative or absolute impairment in insulin secretion, along with varying degrees of peripheral resistance to the action of insulin. The chronic hyperglycemia of diabetes is associated with long-term damage, dysfunction, and failure of various organs, especially the eyes, kidneys, nerves, heart, and blood vessels (ADA, 2003). T2D is characterized by adult onset insulin resistance and a rise in blood sugar concentration.

[0006] In 2000, there were approximately 171 million people, worldwide, with diabetes. The number of people with diabetes will expectedly more than double over the next 25 years, to reach a total of 366 million by 2030 (WHO/IDF, 2004). Most of this increase will occur as a result of a 150% rise in developing countries. This suggests the role of relatively modern environmental or behavioral risk factors such as high caloric intake or sedentary lifestyle. However, ethnic differences in the incidence and prevalence of T2D and the enrichment of T2D in families suggest heritable risk factors to play a major role. In the USA, there are over 15 million diabetics and 15 million people with impaired glucose tolerance. Almost one million Americans become diabetic annually.

[0007] The two main contributors to the worldwide increase in prevalence of diabetes are population ageing and urbanization, especially in developing countries, with the consequent increase in the prevalence of obesity (WHO/IDF, 2004). Currently more than 1 billion adults are overweight - and at least 300 million of them are clinically obese. Current obesity levels range from below 5% in China, Japan and certain African nations, to over 75% in urban Samoa. The prevalence of obesity is 10-25% in Western Europe and 20-27% in the Americas (WHO, 2004).

[0008] In 2000, 3.2 million people died from complications associated with diabetes. Diabetes has become one of the major causes of premature illness and death in most countries, mainly through the increased risk of cardiovascular disease (CVD). Diabetes is a leading cause of blindness, amputation and kidney failure. These complications account for much of the social and financial burden of diabetes (WHO/IDF, 2004).

[0009] Because of the chronic nature of T2D, the severity of its complications and the means required to control them, diabetes is a costly disease, not only for the affected individual and his/her family, but also for the health authorities. In the US direct medical and indirect expenditures attributable to diabetes in 2002 were estimated at $132 billion. Direct medical expenditures alone totalled $91.8 billion and comprised $23.2 billion for diabetes care, $24.6 billion for chronic complications attributable to diabetes, and $44.1 billion for excess prevalence of general medical conditions. Attributable indirect expenditures resulting from lost workdays, restricted activity days, mortality, and permanent disability due to diabetes totalled $39.8 billion (ADA, 2003).

[0010] Classification of DM

[0011] According to the new etiologic classification of DM, four categories are differentiated: type 1 diabetes (T1D), type 2 diabetes (T2D), other specific types, and gestational diabetes mellitus (ADA, 2003). In the United States, Canada, and Europe, over 80% of cases of diabetes are due to T2D, 5 to 10% to TID, and the remainder to other specific causes.

[0012] In T1D, formerly known as insulin-dependent (IDDM), the pancreas fails to produce the insulin which is essential for survival. This form develops most frequently in children and adolescents, but is being increasingly diagnosed later in life. T2D, formerly named non-insulin-dependent (NIDDM), results from the body's inability to respond properly to the action of insulin produced by the pancreas. T2D occurs most frequently in adults, but is being noted increasingly in adolescents as well (WHO, 2004).

[0013] Pathophysiology of T2D

[0014] The causes of T2D are multi-factorial and include both genetic and environmental elements that affect beta cell function and tissue insulin sensitivity (muscle, liver, adipose tissue, pancreas). Although there is considerable debate as to the relative contributions of beta-cell dysfunction and reduced insulin sensitivity to the pathogenesis of diabetes, it is generally agreed that both of these factors play important roles (Scheen A J, 2003).

[0015] Insulin Resistance

[0016] Insulin resistance is probably the first defect in T2D and begins many years before the onset of symptoms or developing a blood glucose level high enough to make the diagnosis (Martin B C et al, 1992). Insulin resistance occurs in the peripheral cells of the body (primarily muscle and fat cells) and the liver. It is caused by genetic factors (see below) as well as environmental factors. The environmental factors include aging, sedentary lifestyle, and central obesity.

[0017] Normally, insulin-signalling proceeds by insulin binding to its cell surface receptor protein, which activates the intrinsic tyrosine kinase activity of the receptor (Saltiel A R and Kahn C R, 2001). The activated receptor kinase then phosphorylates protein substrates within the cell on tyrosine residues. These tyrosine phosphorylated insulin receptor substrate proteins act as docking sites, binding other cellular signalling molecules that serve as adapters in the formation of complexes of intracellular signaling proteins. Downstream from these signalling complexes, the various cellular actions of insulin on glucose and lipid metabolism as well as cell growth are stimulated.

[0018] Recent research has delineated specific mechanisms whereby excess adiposity can influence the normal cellular actions of insulin and contribute to insulin resistance. Among the factors released by adipose tissue free fatty acids (FFA) are elevated in persons with increased visceral adipose tissue (Boden G, 2001; Shulman G I, 2000). When FFAs are elevated for a prolonged amount of time, they have a direct effect on insulin action in skeletal muscle tissue and liver, reducing the normal responses to insulin to promote glucose uptake and to suppress hepatic glucose output, respectively (Boden G, 2001; Shulman G I, 2000). In both of these tissues, FFA increase cellular levels of acyl-CoA derivatives, which leads to an increase in the activity of cellular signalling molecules termed serine kinases that oppose the normal tyrosine phosphorylation cascade of the insulin receptor (Zick Y, 2001). The increased intracellular lipid accumulation that occurs in obese subjects as ectopic fat—that is, triglyceride stored in the target organs themselves rather than in a benign adipose depot—is another important source of intracellular acyl-CoA molecules that can affect normal insulin signal transduction (Ravussin E and Smith S R, 2002). Other proteins secreted by adipose tissue, including the important inflammatory mediators interleukin-6 (IL-6) and tumor necrosis factor alpha (TNFα), have adverse effects on energy metabolism and insulin sensitivity in liver and muscle and play key roles in the development of insulin resistance in obesity (Dandona P et al, 2004). Adiponectin is a recently described plasma protein secreted uniquely from adipose tissue. Unlike TNFα and FFA, whose plasma levels are increased in visceral obesity, the levels of adiponectin are reduced in obese subjects (Berg A H et al, 2002). Studies of the physiologic role of adiponectin have provided evidence that it enhances insulin action and improves sensitivity as well as having anti-inflammatory protective effects on the vascular endothelium. Adiponectin improves the plasma clearance of FFA, glucose, and triglycerides and suppresses hepatic glucose production (Berg A H et al, 2002). In liver, skeletal muscle, and adipose tissue, the mechanism of action of adiponectin has been shown to involve adenosine monophosphate activated protein kinase (AMP kinase) a signalling kinase implicated in the insulin dependent uptake of glucose into skeletal muscle and also in the cellular mechanism of action of metformin (Wu X et al, 2001;Yamauchi T et al, 2002; Tomas E et al, 2002). Also, consistent with the influence of visceral adiposity on insulin resistance and the metabolic syndrome, the regulation of circulating levels of adiponectin appears to be at the level of omental adipose tissue as opposed to the subcutaneous depot (Motoshima H et al, 2002).

[0019] Insulin Deficiency

[0020] As insulin resistance develops, the beta cells increase insulin production to compensate and maintain the blood glucose level in the narrow range needed for normal body function. If insulin resistance persists or increases over time (usually 3-5 years) the beta cells will begin to fail. When insulin resistance persists but insulin secretion decreases and blood glucose levels begin to rise, true diabetes has developed (Guthrie R A and Guthrie D W, 2004). The pattern of beta cell function loss is an initial defect in acute or first-phase insulin secretion, followed by a decreasing maximal capacity of insulin secretion. Last, a defective steady-state and basal insulin secretion develops, leading to almost complete beta-cell failure requiring insulin treatment. Because of the reciprocal relation between insulin secretion and insulin sensitivity, valid representation of beta cell function requires interpretation of insulin responses in the context of the prevailing degree of insulin sensitivity (Scheen A J, 2004). Evidence of the progressive loss of beta cell function may include altered conversion of proinsulin to insulin, changes in pulsed and oscillatory insulin secretion, and quantitative reductions in insulin release. Potential underlying mechanisms are glucose toxicity, lipotoxicity, poor tolerance of increased secretory demand, and a reduction in beta-cell mass (Buchanan T A, 2003). The roles of glucose and fatty acids in altering the function of various cell types in diabetes, in particular that of the beta cells is summarized in the “glucolipotoxicity” hypothesis (Prentki M et al, 2002). It is suggested that either hyperglycemia alone or elevated circulating FFAs alone should not be so detrimental to a cell for the simple reason that when glucose levels alone are high, glucose is oxidized, and when FFAs alone are high, then they are oxidized instead of glucose. However, when both glucose and FFA levels are high they may progressively alter the function of various cell types. Under this condition, FFA-derived long-chain acyl-CoA esters (FACoAs) are high, and furthermore they cannot be oxidized because glucose-derived malonyl-CoA is also elevated. Malonyl-CoA is a metabolic signalling molecule that regulates lipid partitioning (the relative fluxes of FFA oxidation and esterification) through its inhibitory action on carnitine palmitoyltransferase-1 (CPT1), which catalyzes the rate-limiting step of the mitochondrial β-oxidation of fatty acids. As a result, FACoAs accumulate in the cytoplasm and could, for example, promote beta-cell apoptosis. Indeed, it is now realized that, in the vast majority of T2D cases, there is a decreased beta-cell mass caused by a marked increase in beta-cell apoptosis that outweighs rates of beta-cell mitogenesis and neogenesis. Recent advances have implicated signal transduction via insulin receptor substrate-2 (IRS-2) and downstream via protein tyrosine kinase 2 beta (PTK2B) as critical to the control of beta cell survival (Dickson L M and Rhodes C J, 2004).

[0021] T2D: a Polygenic Disease

[0022] T2D has a complex mode of inheritance, as corroborated by family studies indicating major roles of both genetic susceptibility and the environment. There was significant familial aggregation of T2DM and related phenotypes. Generally, the sibling of a patient with T2D has a four to six-fold higher risk of developing the disease (30%-40%) than does an unrelated individual (7%) (Florez J C et al, 2003). A strong genetic influence has also been suggested by a greater concordance rate for type 2 diabetes in monozygotic (MZ) compared with dizygotic (DZ) twin pairs. Rates of concordance of T2D are much higher for monozygotic twins as compared to dizygotic twins. It has been reported that 90% of identical twin pairs were concordant for T2D if followed for long enough (Barnett A H et al, 1981). A concordance rate for T2D of 43% in Danish dizygotic twins as compared to 63% in monozygotic twins has also been reported (Poulsen et al, 1999). The heritability of T2D, glucose intolerance and insulin secretion has been estimated to be 60-80% (Lowe 2001, Lehtovirta et al 2005).

[0023] Known monogenic forms of diabetes are classified in two categories: genetic defects of the beta cell and genetic defects in insulin action (ADA, 2003). The diabetes forms associated with monogenetic defects in beta cell function are frequently characterized by onset of hyperglycemia at an early age (generally before age 25 years). They are referred to as maturity-onset diabetes of the young (MODY) and are characterized by impaired insulin secretion with minimal or no defects in insulin action (Herman W H et al, 1994; Clement K et all, 1996; Byrne M M et al, 1996). They are inherited in an autosomal dominant pattern. Abnormalities at three genetic loci on different chromosomes have been identified to date. The most common form is associated with mutations on chromosome 12q in the locus of a hepatic transcription factor referred to as hepatocyte nuclear factor (HNF)-1α (Vaxillaire M et all, 1995; Yamagata K et al, 1996). A second form is associated with mutations in the locus of the glucokinase gene on chromosome 7p and results in a defective glucokinase molecule (Froguel P et al, 1992; Vionnet N et al, 1992). Glucokinase converts glucose to glucose-6-phosphate, the metabolism of which, in turn, stimulates insulin secretion by the beta cell. Because of defects in the glucokinase gene, increased plasma levels of glucose are necessary to elicit normal levels of insulin secretion. A third form is associated with a mutation in the HNF-4α gene on chromosome 20q (Bell GI et al, 1991; Yamagata K et al, 1996). HNF-4α is a transcription factor involved in the regulation of the expression of HNF-1α. Point mutations in mitochondrial DNA can cause DM primarily by impairing pancreatic beta cell function (Reardon W et al, 1992; van den Ouwenland J M W et al, 1992; Kadowaki T et al, 1994). There are unusual causes of diabetes that result from genetically determined abnormalities of insulin action. The metabolic abnormalities associated with mutations of the insulin receptor may range from hyperinsulinemia and modest hyperglycemia to severe diabetes (Kahn C R et al, 1976; Taylor S I, 1992).

[0024] In most cases, T2D results from a complex interaction of genetic, environmental, and demographic factors. Improved techniques of genetic analysis, especially candidate gene association studies and genome wide linkage analysis (genome wide scan, GWS), have enabled a search for genes that contribute to the development of T2D in the population.

[0025] No major single genes explaining the development of T2D have been identified. However, studies have demonstrated associations between various metabolic defects underlying the development of type 2 diabetes and polymorphisms in several susceptibility genes (e.g., PPARγ and PGC-1). Although more than a hundred candidate genes have been evaluated for T2D, only a handful have been widely replicated. The association of PPARγ with T2D is widely reproduced (Deeb S S et al, 1998; Hara K et al, 2000; Altshulert D et al, 2000; Mori H et al, 2001), and that of KCNJ1 (Hani E H et al, 1998; Gloyn A L et al, 2001; Gloyn A L et al, 2003), ABCC8 (Inoue H, 1996; Hani E H et al, 1997; Hansen T et al, 1998), GCGR (Hager J et al, 1995; Gough S C et al, 1995), GCK (Chiu K C et al, 1992; McCarthy M I et al, 1994; Takekawa K et al, 1994) and SLC2A1 (Li S R et al, 1988; Tao T et al, 1995; Pontiroli A E et al, 1996) have now been seen by multiple groups. An example of recent, still uncorroborated, findings is ARNT gene, a transcription factor essential for embryonic development (Gunton et al 2005).

[0026] Gene-environment interactions have been found between PPARG and birth weight affecting adult insulin sensitivity (Eriksson J G et al, 2002) and between PPARG and dietary fat intake influencing adult BMI (Luan J et al, 2001; Memisoglu A et al, 2003). A gene-gene interaction has also been found between PPARG and FABP4 affecting adult insulin sensitivity and body composition (Damcott C M et al, 2004).

[0027] To date more than 30 GWSs have been reported to identify loci for T2D. Linked loci with at least suggestive LOD scores have been observed on every chromosome. Perhaps most striking is the lack of consistently linked loci. Demenais F et al, 2003 applying the genome-search meta-analysis method (GSMA) to 4 published genome-wide scans of T2D from Caucasian populations (GIFT consortium, Finland, Sweden, UK and France) found evidence of susceptibility regions for T2D on chromosomes 1p13.1-q22, 2p22.1-p13.2, 6q21-q24.1, 12q21.1-q24.12, 16p12.3-q11.2 and 17p11.2-q22, which had modest or non-significant linkage in each individual study. This may serve to illustrate the heterogeneity of human T2D as well as the potential shortcomings of attempting to compare studies using different methodologies.

[0028] Opportunity for Population Genetics

[0029] Developments in GWS and sequencing technology and methods of data analysis render now possible the attempt to identify liability genes in complex, multifactorial traits, and to dissect out with new precision the role of genetic predisposition and environment/life style factors in these disorders. Genetic and environmental effects vary over the life span, and only longitudinal studies in genetically informative data sets permit the study of such effects. A major advantage of population genetics approaches in disease gene discovery over other methodologies is that it will yield diagnostic markers which are valid in humans.

[0030] Identification of genes causing the major public health problems such as T2D is now enabled by the following recent advances in molecular biology, population genetics and bioinformatics: 1. the availability of new genotyping platforms that will dramatically lower operating cost and increase throughputs; 2. the application of genome scans using dense marker maps (>100.000 markers); 3. data analysis using new powerful statistical methods testing for linkage disequilibrium using haplotype sharing analysis, and 4. the recognition that a smaller number of genetic markers than previously thought is sufficient for genome scans in genetically homogeneous populations.

[0031] Traditional GWS using microsatellite markers with linkage analyses have not been successful in finding genes causing common diseases. The failure has in part been due to too small a number of genetic markers used in GWS, and in part due to too heterogeneous study populations. With the advancements of the human genome project and genotyping technology, the first dense marker maps have recently become available for mapping the entire human genome. The microarrays used by Jurilab include probes for over 100 000 SNP markers. These SNPs form a marker map covering, for the first time, the entire genome tightly enough for the discovery of the majority of disease genes causing T2D.

[0032] Genetic Homogeneity of the East Finland Founder Population

[0033] Finns descend from two human immigration waves occurring about 4,000 and 2,000 years ago, respectively. Both Y-chromosomal haplotypes and mitochondrial sequences show low genetic diversity among Finns compared with other European populations and confirm the long-standing isolation of Finland (Sajantila A et al, 1996). During King Gustavus of Vasa (1523-1560) over 400 years ago, internal migrations created regional subisolates, the late settlements (Peltonen L et al, 1999). The most isolated of these are the East Finns.

[0034] The East Finnish population is the most genetically-homogenous population isolate known that is large enough for effective gene discovery program. The reasons for homogeneity are: the young age of the population (fewer generations); the small number of founders; long-term geographical isolation; and population bottlenecks because of wars, famine and fatal disease epidemics.

[0035] Owing to the genetic homogeneity of the East Finland population there are fewer mutations in important disease predisposing genes and the affected individuals share similar genetic background. Because of the stronger linkage disequilibrium (LD), fewer SNPs and fewer subjects are needed for GWS than in other populations.

### SUMMARY OF THE INVENTION

[0036] The present invention relates to single nucleotide polymorphism (SNP) markers, combinations of such markers and haplotypes associated with altered risk of T2D and genes associated with T2D within or close to which said markers or haplotypes are located. Said SNP markers may be associated either with increased T2D risk or reduced T2D risk i.e. protective of T2D. The “prediction” or risk implies here that the risk is either increased or reduced.

[0037] Thus the present invention provides individual SNP markers associated with T2D and combinations of SNP markers and haplotypes in genetic regions associated with T2D, genes previously known in the art, but not known to be associated with T2D, methods of estimating susceptibility or predisposition of an individual to T2D, methods of determining the molecular subtype of T2D as well as methods for prediction of clinical course and efficacy of treatments for T2D using polymorphisms in the T2D risk genes. Accordingly the present invention provides novel methods and compositions based on the disclosed T2D associated SNP markers, combinations of SNP markers, haplotypes and genes.

[0038] The invention further relates to a method for estimating susceptibility or predisposition of an individual to T2D comprising the detection of the presence of SNP markers and haplotypes or an alteration in expression of a T2D risk gene set forth in tables I through 5, as well as alterations in the polypeptides encoded by the said T2D risk genes. The alterations may be quantitative, qualitative, or both.

[0039] The invention yet further relates to a method for estimating susceptibility or predisposition of an individual to T2D. The method for estimating susceptibility or predisposition of an individual to T2D is comprised of detecting the presence of at-risk haplotypes in an individual's nucleic acid.

[0040] The invention further relates to a kit for estimating susceptibility to T2D in an individual comprising wholly or in part: amplification reagents for amplifying nucleic acid fragments containing SNP markers, detection reagents for genotyping SNP markers and interpretation software for data analysis and risk assessment.

[0041] In one aspect, the invention relates to methods of diagnosing a predisposition to T2D. The methods of diagnosing a predisposition to T2D in an individual include detecting the presence of SNP markers predicting T2D, as well as detecting alterations in expression of genes which are associated with said markers. The alterations in expression can be quantitative, qualitative, or both.

[0042] A further object of the present invention is a method of identifying the risk of T2D by detecting SNP markers in a biological sample of the subject. The information obtained from this method can be combined with other information concerning an individual, e.g. results from blood measurements, clinical examination and questionnaires. The blood measurements include but are not restricted to the determination of plasma or serum cholesterol and high-density lipoprotein cholesterol. The information to be collected by questionnaire includes information concerning gender, age, family and medical history such as the family history of obesity and diabetes. Clinical information collected by examination includes e.g. information concerning height, weight, hip and waist circumference and other measures of adiposity and obesity.

[0043] The methods of the invention allow the accurate diagnosis of T2D at or before disease onset, thus reducing or minimizing the debilitating effects of T2D. The method can be applied in persons who are free of clinical symptoms and signs of T2D, in those who have family history of T2D or obesity or in those who have elevated level or levels of risk factors of T2D or obesity.

[0044] The invention further provides a method of diagnosing susceptibility to T2D in an individual. This method comprises screening for at-risk haplotypes that predict T2D that are more frequently present in an individual susceptible to T2D, compared to the frequency of its presence in the general population, wherein the presence of an at-risk haplotype is indicative of a susceptibility to T2D. The “at-risk haplotype” may also be associated with a reduced rather than increased risk of T2D. An “at-risk haplotype” is intended to embrace one or a combination of haplotypes described herein over the markers that show high correlation to T2D. Kits for diagnosing susceptibility to T2D in an individual are also disclosed.

[0045] Those skilled in the art will readily recognize that the analysis of the nucleotides present in one or several of the SNP markers of this invention in an individual's nucleic acid can be done by any method or technique capable of determining nucleotides present in a polymorphic site. As it is obvious in the art the nucleotides present in SNP markers can be determined from either nucleic acid strand or from both strands.

[0046] The major application of the current invention involves prediction of those at higher risk of developing T2D. Diagnostic tests that define genetic factors contributing to T2D might be used together with or independent of the known clinical risk factors to define an individual's risk relative to the general population. Better means for identifying those individuals at risk for T2D should lead to better preventive and treatment regimens, including more aggressive management of the risk factors for T2D such as obesity and of the risk factors for sequelae of T2D such as cigarette smoking, hypercholesterolemia, elevated LDL cholesterol, low HDL cholesterol, elevated BP, obesity, lack of physical activity, and inflammatory components as reflected by increased C-reactive protein levels or other inflammatory markers. Information on genetic risk may be used by physicians to help convince particular patients to adjust life style (e.g. to stop smoking, to reduce caloric intake, to increase exercise). Finally, preventive measures aimed at lowering blood pressure such as reduction of weight, intake of salt and alcohol can be both better motivated to the patients who are at an elevated risk of T2D and selected on the basis of the molecular subdiagnosis of T2D.

[0047] A further object of the invention is a method for molecular diagnosis of T2D. The genetic etiology of T2D in an individual will provide information of the molecular etiology of T2D. When the molecular etiology is known, the therapy can be selected on the basis of this etiology. For example, the drug that is likely to be effective, i.e. blood glucose lowering, can be selected without trial and error.

[0048] A further object of the invention is to provide a method for the selection of human subjects for studies testing antidiabetic effects of drugs. Another object of the invention is a method for the selection of subjects for clinical trials testing antidiabetic drugs.

[0049] Still another object of the invention is to provide a method for prediction of clinical course and efficacy of treatments for T2D using polymorphisms in the T2D risk genes. The genes, gene products and agents of the invention are also useful for treating T2D, for monitoring the effectiveness of their treatment, and for drug development. Kits are also provided for the diagnosis, treatment and prognosis of T2D.

### DETAILED DESCRIPTION OF THE INVENTION

[0050] Methods of Therapy

[0051] The present invention discloses novel methods for the prevention and treatment of T2D.

[0052] The term, “treatment” as used herein, refers not only to ameliorating symptoms associated with the disease, but also preventing or delaying the onset of the disease, and also lessening the severity or frequency of symptoms of the disease, preventing or delaying the occurrence of a second episode of the disease or condition; and/or also lessening the severity or frequency of symptoms of the disease or condition.

[0053] In particular, the invention relates to methods of treatment for T2D or susceptibility to T2D (for example, for individuals in an at-risk population such as those described herein); as well as to methods of treatment for manifestations and subtypes of T2D.

[0054] The present invention encompasses methods of treatment (prophylactic and/or therapeutic) for T2D, such as individuals in the target populations described herein, using a T2D therapeutic agent. A “T2D therapeutic agent” is an agent that alters (e.g., enhances or inhibits) enzymatic activity or function of a T2D risk affecting polypeptide, and/or expression of a T2D risk gene as described herein. Useful therapeutic agents can alter a T2D susceptibility polypeptide activity or function and/or expression of a disease susceptibility gene by a variety of means, such as, for example, by altering translation rate of a T2D susceptibility polypeptide encoding mRNA; by altering the transcription rate of the T2D risk gene; by altering posttranslational processing of a T2D susceptibility polypeptide; by interfering with a T2D susceptibility polypeptide activity and/or function (e.g., by binding to a T2D susceptibility polypeptide); by altering stability of a T2D susceptibility polypeptide; by altering the transcription rate of splice variants of a T2D risk gene or by inhibiting or enhancing the elimination of a T2D susceptibility polypeptide from target cells, organs and/or tissues.

[0055] Representative T2D therapeutic agents comprise the following: (a) nucleic acids, fragments, variants or derivatives of T2D associated genes described in this invention, nucleic acids encoding a T2D susceptibility polypeptide or an active fragment or a derivative thereof and nucleic acids modifying the expression of said T2D genes (e.g. antisense polynucleotides, catalytically active polynucleotides (e.g. ribozymes and DNAzymes), molecules inducing RNA interference (RNAi) and micro RNA), and vectors comprising said nucleic acids; (b) T2D susceptibility polypeptides, active fragments, variants or derivatives thereof, binding agents of T2D susceptibility polypeptides; peptidomimetics; fusion proteins or prodrugs thereof, antibodies (e.g., an antibody to a mutant T2D susceptibility polypeptide, or an antibody to a non-mutant T2D susceptibility polypeptide, or an antibody to a particular variant encoded by a T2D risk gene, as described above) and other polypeptides (e.g., T2D susceptibility receptors, active fragments, variants or derivatives thereof); (c) metabolites of T2D susceptibility polypeptides or derivatives thereof; (d) small molecules and compounds that alter (e.g., inhibit or antagonize) a T2D risk gene expression, activity and/or function of a T2D risk gene encoded polypeptide, or activity and/or function of a T2D gene related metabolic pathway and; (e) small molecules and compounds that alter (e.g. induce or agonize) a T2D risk gene expression, activity and/or function of a T2D risk gene encoded polypeptide, or activity and/or function of a T2D gene related metabolic pathway.

[0056] More than one T2D therapeutic agent can be used concurrently, if desired. The therapy is designed to alter (e.g., inhibit or enhance), replace or supplement activity and/or function of one or several T2D polypeptides or related metabolic pathways in an individual. For example, a T2D therapeutic agent can be administered in order to upregulate or increase the expression or availability of a T2D risk gene or a specific variant of a T2D susceptibility gene or, conversely, to downregulate or decrease the expression or availability of a T2D risk gene or a specific variant of a T2D risk gene. Upregulation or increasing expression or availability of a native T2D risk gene or a particular variant of a T2D susceptibility gene could interfere with or compensate for the expression or activity of a defective gene or variant; downregulation or decreasing expression or availability of a native T2D risk gene or a particular splicing variant of a T2D susceptibility gene could minimize the expression or activity of a defective gene or the particular variant and thereby minimize the impact of the defective gene or the particular variant.

[0057] The T2D therapeutic agent(s) are administered in a therapeutically effective amount (i.e., an amount that is sufficient to treat the disease, such as by ameliorating symptoms associated with the disease, preventing or delaying the onset of the disease, and/or also lessening the severity or frequency of symptoms of the disease). The amount which will be therapeutically effective in the treatment of a particular individual's disorder or condition will depend on the symptoms and severity of the disease, and can be determined by standard clinical techniques. In addition, in vitro or in vivo assays may optionally be employed to help identify optimal dosage ranges. The precise dose to be employed in the formulation will also depend on the route of administration, and the seriousness of the disease or disorder, and should be decided according to the judgment of a practitioner and each patient's circumstances. Effective doses may be extrapolated from dose-response curves derived from in vitro or animal model test systems.

[0058] In one embodiment, a nucleic acid of the invention (e.g., a nucleic acid encoding a T2D susceptibility polypeptide, fragment, variant or derivative thereof), either by itself or included within a vector, can be introduced into cells of an individual affected by T2D using variety of experimental methods described in the art, so that the treated cells start to produce native T2D susceptibility polypeptide. Thus, cells which, in nature, lack of a native T2D risk gene expression and activity, or have abnormal T2D risk gene expression and activity, can be engineered to express a T2D susceptibility polypeptide or an active fragment or a different variant of said T2D susceptibility polypeptide. Genetic engineering of cells may be done either “ex vivo ” (i.e. suitable cells are isolated and purified from a patient and re-infused back to the patient after genetic engineering) or “in vivo” (i.e. genetic engineering is done directly to a tissue of a patient using a vehicle).

[0059] Alternatively, in another embodiment of the invention, a nucleic acid of the invention; a nucleic acid complementary to a nucleic acid of the invention; or a portion of such a nucleic acid (e.g., a polynucleotide), can be used in “antisense” therapy, in which a nucleic acid (e.g., a polynucleotide) which specifically hybridizes to the mRNA and/or genomic DNA of a T2D risk gene is administered in a pharmaceutical composition to the target cells or said nucleic acid is generated “in vivo”. The antisense nucleic acid that specifically hybridizes to the mRNA and/or DNA inhibits expression of the T2D susceptibility polypeptide, e.g., by inhibiting translation and/or transcription. Binding of the antisense nucleic acid can be due to conventional base pairing, or, for example, in the case of binding to DNA duplexes, through specific interaction in the major groove of the double helix.

[0060] In a preferred embodiment nucleic acid therapeutic agents of the invention are delivered into cells that express one or several T2D risk genes. A number of methods including, but not limited to, the methods known in the art can be used for delivering a nucleic acid to said cells. For example, a vector can be introduced in vivo such that it is taken up by a cell and directs the transcription of a RNA molecule, which induces RNA interference in the cell. Such a vector can remain episomal or become chromosomally integrated, and as long as it can be transcribed to produce the desired RNA molecules it will modify the expression of a T2D risk gene. Such vectors can be constructed by various recombinant DNA technology methods standard in the art.

[0061] The expression of an endogenous T2D risk gene can be also reduced by inactivating or “knocking out” a T2D risk gene or its promoter using targeted homologous recombination methods described in the art. Alternatively, expression of a functional, non-mutant T2D risk gene can be increased using a similar method: targeted homologous recombination can be used to replace a non-functional T2D risk gene with a functional form of the said gene in a cell.

[0062] In yet another embodiment of the invention, other T2D therapeutic agents as described herein can also be used in the treatment or prevention of T2D. The therapeutic agents can be delivered in a pharmaceutical composition, they can be administered systemically, or can be targeted to a particular tissue. The therapeutic agents can be produced by a variety of means, including chemical synthesis, cell culture and recombinant techniques (e.g. with transgenic cells and animals). Therapeutic agents can be isolated and purified to fulfill pharmaceutical requirements using standard methods described in the art.

[0063] A combination of any of the above methods of treatment (e.g., administration of non-mutant T2D susceptibility polypeptide in conjunction with RNA molecules inducing RNA interference targeted to the mutant T2D susceptibility mRNA) can also be used.

[0064] In the case of pharmaceutical therapy, the invention comprises compounds, which enhance or reduce the activity and/or function of one or several polypeptides encoded by T2D susceptibility genes set forth in table 12. The treatment may also enhance or reduce the expression of one or several genes selected from T2D susceptibility genes set forth in table 12.

[0065] In another embodiment of the invention, pharmaceutical therapy of the invention comprises compounds, which enhance or reduce the activity and/or function of one or several biological networks and/or metabolic pathways related to T2D susceptibility genes, proteins or polypeptides. The treatment may also enhance or reduce the expression of one or several genes in biological networks and/or metabolic pathways related to T2D susceptibility genes, proteins or polypeptides.

[0066] Furthermore, a disclosed method or a test based on T2D susceptibility gene specific markers (e.g. polymorphic sites, expression or polypeptides) is useful in selecting drug therapy for patients with T2D.

[0067] The invention also discloses methods to assess the risk of an individual to develop T2D in mammals. A gene test recognizing the T2D risk allele homozygocity or carrier status of T2D susceptibility genes is useful in selecting prophylactic treatment for individuals having a high risk of T2D.

[0068] Yet in another embodiment of the invention, a test or a method based on T2D susceptibility gene specific markers (e.g. polymorphic sites, expression or polypeptides) is useful in selecting subjects testing treatments for T2D.

[0069] A test or a method of this invention based on T2D susceptibility gene specific markers (e.g. polymorphic sites, expression or polypeptides) is useful in selecting drug therapy for patients who might be at increased risk for adverse effects of drugs affecting T2D susceptibility gene activity.

[0070] If the less frequent, i.e. the minor, assumable mutated allele in the T2D susceptibility gene is risk-reducing, and if said mutation is a gene function reducing mutation, one can deduce that the gene function and/or activity would increase the risk of T2D. On that basis, drugs and other therapies such as gene therapies that reduce or inhibit the function or activity of the T2D susceptibility gene or the encoded protein would reduce the risk of the said disease and could be used to both prevent and treat the said disease.

[0071] Pharmaceutical Compositions

[0072] The present invention also pertains to pharmaceutical compositions comprising agents described herein, particularly polynucleotides, polypeptides and any fractions, variants or derivatives of T2D susceptibility genes, and/or agents that alter (e.g., enhance or inhibit) expression of T2D risk gene or genes, or activity of one or more polypeptides encoded by T2D susceptibility gene or genes as described herein. For instance, an agent that alters expression of T2D risk genes, or activity of one or more polypeptides encoded by T2D susceptibility genes or a T2D susceptibility polypeptide binding agent, binding partner, fragment, fusion protein or prodrug thereof, or polynucleotides of the present invention, can be formulated with a physiologically acceptable carrier or excipient to prepare a pharmaceutical composition. The carrier and composition can be sterile. The formulation should suit the mode of administration.

[0073] In a preferred embodiment pharmaceutical compositions comprise agent or agents reversing, at least partially, T2D associated changes in biological networks and/or metabolic pathways related to the T2D associated genes of this invention.

[0074] Suitable pharmaceutically acceptable carriers include but are not limited to water, salt solutions (e.g., NaCl), saline, buffered saline, alcohols, glycerol, ethanol, gum arabic, vegetable oils, benzyl alcohols, polyethylene glycols, gelatin, carbohydrates such as lactose, amylose or starch, dextrose, magnesium stearate, talc, silicic acid, viscous paraffin, perfume oil, fatty acid esters, hydroxymethylcellulose, polyvinyl pyrolidone, etc., as well as combinations thereof. The pharmaceutical preparations can, if desired, be mixed with auxiliary agents, e.g., lubricants, preservatives, stabilizers, wetting agents, emulsifiers, salts for influencing osmotic pressure, buffers, coloring, flavoring and/or aromatic substances and the like which do not deleteriously react with the active agents.

[0075] The composition, if desired, can also contain minor amounts of wetting or emulsifying agents, or pH buffering agents. The composition can be a liquid solution, suspension, emulsion, tablet, pill, capsule, sustained release formulation, or powder. The composition can be formulated as a suppository, with traditional binders and carriers such as triglycerides. Oral formulation can include standard carriers such as pharmaceutical grades of mannitol, lactose, starch, magnesium stearate, polyvinyl pyrolidone, sodium saccharine, cellulose, magnesium carbonate, etc.

[0076] Methods of introduction of these compositions include, but are not limited to, intradermal, intramuscular, intraperitoneal, intraocular, intravenous, subcutaneous, topical, oral and intranasal. Other suitable methods of introduction can also include gene therapy (as described below), rechargeable or biodegradable devices, particle acceleration devises (“gene guns”) and slow release polymeric devices. The pharmaceutical compositions of this invention can also be administered as part of a combinatorial therapy with other agents.

[0077] The composition can be formulated in accordance with the routine procedures as a pharmaceutical composition adapted for administration to human beings. For example, compositions for intravenous administration typically are solutions in sterile isotonic aqueous buffer. Where necessary, the composition may also include a solubilizing agent and a local anesthetic to ease pain at the site of the injection. Generally, the ingredients are supplied either separately or mixed together in unit dosage form, for example, as a dry lyophilized powder or water free concentrate in a hermetically sealed container such as an ampule or sachette indicating the quantity of active agent. Where the composition is to be administered by infusion, it can be dispensed with an infusion bottle containing sterile pharmaceutical grade water, saline or dextrose/water. Where the composition is administered by injection, an ampule of sterile water for injection or saline can be provided so that the ingredients may be mixed prior to administration.

[0078] For topical application, nonsprayable forms, viscous to semi-solid or solid forms comprising a carrier compatible with topical application and having a dynamic viscosity preferably greater than water, can be employed. Suitable formulations include but are not limited to solutions, suspensions, emulsions, creams, ointments, powders, enemas, lotions, sols, liniments, salves, aerosols, etc., which are, if desired, sterilized or mixed with auxiliary agents, e.g., preservatives, stabilizers, wetting agents, buffers or salts for influencing osmotic pressure, etc. The agent may be incorporated into a cosmetic formulation. For topical application, also suitable are sprayable aerosol preparations wherein the active ingredient, preferably in combination with a solid or liquid inert carrier material, is packaged in a squeeze bottle or in admixture with a pressurized volatile, normally gaseous propellant, e.g., pressurized air.

[0079] Agents described herein can be formulated as neutral or salt forms. Pharmaceutically acceptable salts include those formed with free amino groups such as those derived from hydrochloric, phosphoric, acetic, oxalic, tartaric acids, etc., and those formed with free carboxyl groups such as those derived from sodium, potassium, ammonium, calcium, ferric hydroxides, isopropylamine, triethylamine, 2-ethylamino ethanol, histidine, procaine, etc.

[0080] The agents are administered in a therapeutically effective amount. The amount of agents which will be therapeutically effective in the treatment of a particular disorder or condition will depend on the nature of the disorder or condition, and can be determined by standard clinical techniques. In addition, in vitro or in vivo assays may optionally be employed to help identify optimal dosage ranges. The precise dose to be employed in the formulation will also depend on the route of administration, and the seriousness of the symptoms of T2D, and should be decided according to the judgment of a practitioner and each patient's circumstances. Effective doses may be extrapolated from dose-response curves derived from in vitro or animal model test systems.

[0081] Representative Target Population

[0082] An individual at risk of T2D is an individual who has at least one risk factor, such as family history of T2D or obesity, history of gestational diabetes, previously identified glucose intolerance, obesity, hypertriglyceridemia, low HDL cholesterol, HT and elevated BP, lack of physical activity, and an at-risk allele or haplotype with one or several T2D risk SNP markers.

[0083] In another embodiment of the invention, an individual who is at risk of T2D is an individual who has at least one risk-increasing allele in a T2D risk gene, in which the presence of the polymorphism is indicative of a susceptibility to T2D. The term “gene,” as used herein, refers to an entirety containing all regulatory elements located both upstream and downstream as well as within of a polypeptide encoding sequence of a gene and entire transcribed region of a gene including 5′ and 3′ untranslated regions of mRNA and the entire polypeptide encoding sequence including all exon and intron sequences (also alternatively spliced exons and introns) of a gene.

[0084] Assessment for At-Risk Alleles and At-Risk Haplotypes

[0085] The genetic markers are particular “alleles” at “polymorphic sites” associated with T2D. A nucleotide position in genome at which more than one sequence is possible in a population, is referred to herein as a “polymorphic site”. Where a polymorphic site is a single nucleotide in length, the site is referred to as a SNP. For example, if at a particular chromosomal location, one member of a population has an adenine and another member of the population has a thymine at the same position, then this position is a polymorphic site, and, more specifically, the polymorphic site is a SNP. Polymorphic sites may be several nucleotides in length due to insertions, deletions, conversions or translocations. Each version of the sequence with respect to the polymorphic site is referred to herein as an “allele” of the polymorphic site. Thus, in the previous example, the SNP allows for both an adenine allele and a thymine allele.

[0086] Typically, a reference nucleotide sequence is referred to for a particular gene e.g. in NCBI databases (www.ncbi.nlm.nih.gov). Alleles that differ from the reference are referred to as “variant” alleles. The polypeptide encoded by the reference nucleotide sequence is the “reference” polypeptide with a particular reference amino acid sequence, and polypeptides encoded by variant alleles are referred to as “variant” polypeptides with variant amino acid sequences.

[0087] Nucleotide sequence variants can result in changes affecting properties of a polypeptide. These sequence differences, when compared to a reference nucleotide sequence, include insertions, deletions, conversions and substitutions: e.g. an insertion, a deletion or a conversion may result in a frame shift generating an altered polypeptide; a substitution of at least one nucleotide may result in a premature stop codon, amino acid change or abnormal mRNA splicing; the deletion of several nucleotides, resulting in a deletion of one or more amino acids encoded by the nucleotides; the insertion of several nucleotides, such as by unequal recombination or gene conversion, resulting in an interruption of the coding sequence of a reading frame; duplication of all or a part of a sequence; transposition; or a rearrangement of a nucleotide sequence, as described in detail above. Such sequence changes alter the polypeptide encoded by a T2D susceptibility gene. For example, a nucleotide change resulting in a change in polypeptide sequence can alter the physiological properties of a polypeptide dramatically by resulting in altered activity, distribution and stability or otherwise affect on properties of a polypeptide.

[0088] Alternatively, nucleotide sequence variants can result in changes affecting transcription of a gene or translation of its mRNA. A polymorphic site located in a regulatory region of a gene may result in altered transcription of a gene e.g. due to altered tissue specificity, altered transcription rate or altered response to transcription factors. A polymorphic site located in a region corresponding to the mRNA of a gene may result in altered translation of the mRNA e.g. by inducing stable secondary structures to the mRNA and affecting the stability of the mRNA. Such sequence changes may alter the expression of a T2D susceptibility gene.

[0089] A “haplotype,” as described herein, refers to any combination of genetic markers (“alleles”). A haplotype can comprise two or more alleles and the length of a genome region comprising a haplotype may vary from few hundred bases up to hundreds of kilobases. As it is recognized by those skilled in the art the same haplotype can be described differently by determining the haplotype defining alleles from different nucleic acid strands. E.g. the haplotype CAC defined by the SNP markers rs2400503 (C/T), rs10515605 (A/G), and rs7709159 (C/T) is the same as the haplotype GTG in which the SNP markers rs2400503 (C/T), rs10515605 (A/G), and rs7709159 (C/T) are determined from the complementary strand or haplotype GAC in which the SNP marker rs2400503 (C/T) is determined from the complementary strand. The haplotypes described herein are found more frequently in individuals with T2D risk than in individuals without T2D risk. Therefore, these haplotypes have predictive value for detecting T2D risk or a susceptibility to T2D in an individual. Therefore, detecting haplotypes can be accomplished by methods known in the art for detecting sequences at polymorphic sites.

[0090] It is understood that the T2D associated at-risk alleles and at-risk haplotypes described in this invention may be associated with other “polymorphic sites” located in T2D associated genes of this invention. These other T2D associated polymorphic sites may be either equally useful as genetic markers or even more useful as causative variations explaining the observed association of at-risk alleles and at-risk haplotypes of this invention to T2D.

[0091] In certain methods described herein, an individual who is at risk for T2D is an individual in whom an at-risk allele or an at-risk haplotype is identified. In one embodiment, the at-risk allele or the at-risk haplotype is one that confers a significant risk of death. In one embodiment, significance associated with an allele or a haplotype is measured by an odds ratio. In a further embodiment, the significance is measured by a percentage. In one embodiment, a significant risk is measured as odds ratio of 0.8 or less or at least about 1.2, including by not limited to: 0.1, 0.2, 0.3, 0.4, 0.5, 0.6, 0.7, 0.8, 1.2, 1.3, 1.4, 1.5, 1.6, 1.7, 1.8, 1.9, 2.0, 2.5, 3.0, 4.0, 5.0, 10.0, 15.0, 20.0, 25.0, 30.0 and 40.0. In a further embodiment, a significant increase or reduction in risk is at least about 20%, including but not limited to about 25%, 30%, 35%,40%, 45%, 50%, 55%, 60%, 65%, 70%, 75%, 80%, 85%, 90%, 95% and 98%. In a further embodiment, a significant increase in risk is at least about 50%. It is understood however, that identifying whether a risk is medically significant may also depend on a variety of factors, including the specific disease, the allele or the haplotype, and often, environmental factors.

[0092] An at-risk haplotype in, or comprising portions of, the T2D risk gene, is one where the haplotype is more frequently present in an individual at risk for T2D (affected), compared to the frequency of its presence in a healthy individual (control), and wherein the presence of the haplotype is indicative of T2D risk or susceptibility to T2D.

[0093] In a preferred embodiment, the method comprises assessing in an individual the presence or frequency of SNP markers in, comprising portions of, a T2D risk gene, wherein an excess or higher frequency of the SNP markers compared to a healthy control individual is indicative that the individual has T2D risk, or is susceptible to T2D. The presence of the haplotype is indicative of T2D risk, or a susceptibility to T2D, and therefore is indicative of an individual who falls within a target population for the treatment methods described herein.

[0094] Primers, Probes and Nucleic Acid Molecules

[0095] “Probes” or “primers” are oligonucleotides that hybridize in a base-specific manner to a complementary strand of nucleic acid molecules. By “base specific manner” is meant that the two sequences must have a degree of nucleotide complementarity sufficient for the primer or probe to hybridize. Accordingly, the primer or probe sequence is not required to be perfectly complementary to the sequence of the template. Non-complementary bases or modified bases can be interspersed into the primer or probe, provided that base substitutions do not inhibit hybridization. The nucleic acid template may also include “non-specific priming sequences” or “nonspecific sequences” to which the primer or probe has varying degrees of complementarity. Such probes and primers include polypeptide nucleic acids (Nielsen P E et al, 1991).

[0096] A probe or primer comprises a region of nucleic acid that hybridizes to at least about 15, for example about 20-25, and in certain embodiments about 40, 50 or 75, consecutive nucleotides of a nucleic acid of the invention, such as a nucleic acid comprising a contiguous nucleic acid sequence.

[0097] In preferred embodiments, a probe or primer comprises 100 or fewer nucleotides, in certain embodiments, from 6 to 50 nucleotides, for example, from 12 to 30 nucleotides. In other embodiments, the probe or primer is at least 70% identical to the contiguous nucleic acid sequence or to the complement of the contiguous nucleotide sequence, for example, at least 80% identical, in certain embodiments at least 90% identical, and in other embodiments at least 95% identical, or even capable of selectively hybridizing to the contiguous nucleic acid sequence or to the complement of the contiguous nucleotide sequence. Often, the probe or primer further comprises a label, e.g., radioisotope, fluorescent compound, enzyme, or enzyme co-factor.

[0098] Antisense nucleic acid molecules of the invention can be designed using the nucleotide sequences of T2D risk genes and/or their complementary sequences and constructed using chemical synthesis and enzymatic ligation reactions using procedures known in the art. For example, an antisense nucleic acid molecule (e.g., an antisense oligonucleotide) can be chemically synthesized using naturally occurring nucleotides or variously modified nucleotides designed to increase the biological stability of the molecules or to increase the physical stability of the duplex formed between the antisense and sense nucleic acids, e.g., phosphorothioate derivatives and acridine substituted nucleotides can be used. Alternatively, the antisense nucleic acid molecule can be produced biologically using an expression vector into which a nucleic acid molecule encoding a T2D risk gene, a fragment or a variant thereof has been cloned in antisense orientation (i.e., RNA transcribed from the expression vector will be complementary to the transcribed RNA of a T2D risk gene of interest).

[0099] The nucleic acid sequences of the T2D associated genes described in this invention can also be used to compare with endogenous DNA sequences in patients to identify genetic disorders (e.g., a predisposition for or susceptibility to T2D), and as probes, such as to hybridize and discover related DNA sequences or to subtract out known sequences from a sample. The nucleic acid sequences can further be used to derive primers for genetic fingerprinting, to raise anti-polypeptide antibodies using DNA immunization techniques, and as an antigen to raise anti-DNA antibodies or elicit immune responses. Portions or fragments of the nucleotide sequences identified herein (and the corresponding complete gene sequences) can be used in numerous ways as polynucleotide reagents. For example, these sequences can be used to: (i) map their respective genes on a chromosome; and, thus, locate gene regions associated with genetic disease; (ii) identify an individual from a minute biological sample (tissue typing); and (iii) aid in forensic identification of a biological sample. Additionally, the nucleotide sequences of the invention can be used to identify and express recombinant polypeptides for analysis, characterization or therapeutic use, or as markers for tissues in which the corresponding polypeptide is expressed, either constitutively, during tissue differentiation, or in diseased states. The nucleic acid sequences can additionally be used as reagents in the screening and/or diagnostic assays described herein, and can also be included as components of kits (e.g., reagent kits) for use in the screening and/or diagnostic assays described herein.

[0100] Polyclonal and Monoclonal Antibodies

[0101] The invention comprises polyclonal and monoclonal antibodies that bind to polypeptides of the invention. The term “antibody” as used herein refers to immunoglobulin molecules and immunologically active portions of immunoglobulin molecules, i.e., molecules that contain a binding site that specifically binds to an epitope (antigen, antigenic determinant). An antibody molecule that specifically binds to a polypeptide of the invention is a molecule that binds to an epitope present in said polypeptide or a fragment thereof, but does not substantially bind other molecules in a sample, e.g., a biological sample, which naturally contains the polypeptide. Examples of immunologically active portions of immunoglobulin molecules include F(ab) and F(ab′).sub.2 fragments which can be generated by treating the antibody with an enzyme such as pepsin. Polyclonal and/or monoclonal antibodies that specifically bind one form of the gene product but not to the other form of the gene product are also provided. Antibodies are also provided, that bind a portion of either the variant or the reference gene product that contains the polymorphic site or sites. The term “monoclonal antibody” or “monoclonal antibody composition”, as used herein refers to a population of antibody molecules that are directed against a specific epitope and are produced either by a single clone of B cells or a single hybridoma cell line. A monoclonal antibody composition thus typically displays a single binding affinity for a particular polypeptide of the invention with which it immunoreacts.

[0102] Polyclonal antibodies can be prepared as known by those skilled in the art by immunizing a suitable subject with a desired immunogen, e.g., polypeptide of the invention or fragment thereof. The antibody titer in the immunized subject can be monitored over time by standard techniques, such as with an enzyme linked immunosorbent assay (ELISA) using immobilized polypeptide. If desired, the antibody molecules directed against the polypeptide can be isolated from the mammal (e.g., from the blood) and further purified by well-known techniques, such as protein A chromatography to obtain the IgG fraction. At an appropriate time after immunization, e.g., when the antibody titers are highest, antibody-producing cells can be obtained from the subject and used to prepare monoclonal antibodies by standard techniques, such as the hybridoma technique (Kohler G and Milstein C, 1975), the human B cell hybridoma technique (Kozbor D et al, 1982), the EBV-hybridoma technique (Cole S P et al, 1984), or trioma techniques (Hering S et al, 1988). To produce a hybridoma an immortal cell line (typically a myeloma) is fused to lymphocytes (typically splenocytes) from a mammal immunized with an immunogen as described above, and the culture supernatants of the resulting hybridoma cells are screened to identify a hybridoma producing a monoclonal antibody that binds a polypeptide of the invention.

[0103] Any of the many well known protocols used for fusing lymphocytes and immortalized cell lines can be applied for the purpose of generating a monoclonal antibody to a polypeptide of the invention (Bierer B et al, 2002). Moreover, the ordinarily skilled worker will appreciate that there are many variations of such methods that also would be useful. Alternative to preparing monoclonal antibody-secreting hybridomas, a monoclonal antibody to a polypeptide of the invention can be identified and isolated by screening a recombinant combinatorial immunoglobulin library (e.g., an antibody phage display library) with the polypeptide to thereby isolate immunoglobulin library members that bind the polypeptide (Hayashi N et al, 1995; Hay B N et al, 1992; Huse W D et al, 1989; Griffiths A D et al, 1993). Kits for generating and screening phage display libraries are commercially available.

[0104] Additionally, recombinant antibodies, such as chimeric and humanized monoclonal antibodies, comprising both human and non-human portions, which can be made using standard recombinant DNA techniques, are within the scope of the invention. Such chimeric and humanized monoclonal antibodies can be produced by recombinant DNA techniques known in the art.

[0105] In general, antibodies of the invention (e.g., a monoclonal antibody) can be used to isolate a polypeptide of the invention by standard techniques, such as affinity chromatography or immunoprecipitation. An antibody specific for a polypeptide of the invention can facilitate the purification of a native polypeptide of the invention from biological materials, as well as the purification of recombinant form of a polypeptide of the invention from cultured cells (culture media or cells). Moreover, an antibody specific for a polypeptide of the invention can be used to detect the polypeptide (e.g., in a cellular lysate, cell supernatant, or tissue sample) in order to evaluate the abundance and pattern of expression of the polypeptide. Antibodies can be used diagnostically to monitor protein levels in tissue such as blood as part of a test predicting the susceptibility to T2D or as part of a clinical testing procedure, e.g., to, for example, determine the efficacy of a given treatment regimen. Antibodies can be coupled to various enzymes, prosthetic groups, fluorescent materials, luminescent materials, bioluminescent materials, and radioactive materials to enhance detection. Examples of suitable enzymes include horseradish peroxidase, alkaline phosphatase, beta-galactosidase, or acetylcholinesterase; examples of suitable prosthetic group complexes include streptavidin/biotin and avidin/biotin; examples of suitable fluorescent materials include umbelliferone, fluorescein, fluorescein isothiocyanate, rhodamine, dichlorotriazinylamine fluorescein, dansyl chloride or phycoerythrin; an example of a luminescent material includes luminol; examples of bioluminescent materials include luciferase, luciferin, and aequorin, and examples of suitable radioactive material include .sup.125I, 131I, 35S or 3H.

[0106] Highly purified antibodies (e.g. monoclonal humanized antibodies specific to a polypeptide encoded by a T2D associated gene of this invention) may be produced using GMP-compliant manufacturing processes well known in the art. These “pharmaceutical grade” antibodies can be used in novel therapies modulating activity and/or function of a polypeptide encoded by a T2D associated gene of this invention or modulating activity and/or function of a metabolic pathway related a T2D associated gene of this invention.

[0107] Diagnostic Assays

[0108] The markers, probes, primers and antibodies described herein can be used in methods and kits used for risk assessment, diagnosis or prognosis of T2D or a disease or condition associated with T2D in a subject.

[0109] In one embodiment of the invention, diagnosis of risk or susceptibility to T2D (or diagnosis of or susceptibility to a disease or condition associated with T2D), is made by detecting one or several of at-risk alleles or at-risk haplotypes or a combination of at-risk alleles and at-risk haplotypes described in this invention in the subject's nucleic acid as described herein.

[0110] In one embodiment of the invention, diagnosis of risk or susceptibility to T2D (or diagnosis of or susceptibility to a disease or condition associated with T2D), is made by detecting one or several of polymorphic sites which are associated with at-risk alleles or/and at-risk haplotypes described in this invention in the subject's nucleic acid. Diagnostically the most useful polymorphic sites are those altering the polypeptide structure of a T2D associated gene due to a frame shift; due to a premature stop codon, due to an amino acid change or due to abnormal mRNA splicing. Nucleotide changes resulting in a change in polypeptide sequence in many cases alter the physiological properties of a polypeptide by resulting in altered activity, distribution and stability or otherwise affect on properties of a polypeptide. Other diagnostically useful polymorphic sites are those affecting transcription of a T2D associated gene or translation of it's mRNA due to altered tissue specificity, due to altered transcription rate, due to altered response to physiological status, due to altered translation efficiency of the mRNA and due to altered stability of the mRNA. The presence of nucleotide sequence variants altering the polypeptide structure of T2D associated genes or altering the expression of T2D associated genes is diagnostic for susceptibility to T2D.

[0111] For diagnostic applications, there may be polymorphisms informative for prediction of disease risk, which are in linkage disequilibrium with the functional polymorphism. Such a functional polymorphism may alter splicing sites, affect the stability or transport of mRNA, or otherwise affect the transcription or translation of the nucleic acid. The presence of nucleotide sequence variants associated with a functional polymorphism is diagnostic for susceptibility to T2D. While we have genotyped and included a limited number of example SNP markers in the experimental section, any functional, regulatory or other mutation or alteration described above in any of the T2D risk genes identified herein is expected to predict the risk of T2D.

[0112] In diagnostic assays determination of the nucleotides present in one or several of the T2D associated SNP markers of this invention, as well as polymorphic sites associated with T2D associated SNP markers of this invention, in an individual's nucleic acid can be done by any method or technique which can accurately determine nucleotides present in a polymorphic site. Numerous suitable methods have been described in the art (see e.g. Kwok P-Y, 2001; Syvanen A-C, 2001), these methods include, but are not limited to, hybridization assays, ligation assays, primer extension assays, enzymatic cleavage assays, chemical cleavage assays and any combinations of these assays. The assays may or may not include PCR, solid phase step, a microarray, modified oligonucleotides, labeled probes or labeled nucleotides and the assay may be multiplex or singleplex. As it is obvious in the art the nucleotides present in a polymorphic site can be determined from either nucleic acid strand or from both strands.

[0113] In another embodiment of the invention, diagnosis of a susceptibility to T2D can be assessed by examining transcription of one or several T2D associated genes. Alterations in transcription can be assessed by a variety of methods described in the art, including e.g. hybridization methods, enzymatic cleavage assays, RT-PCR assays and microarrays. A test sample from an individual is collected and the alterations in the transcription of T2D associated genes are assessed from the RNA present in the sample. Altered transcription is diagnostic for a susceptibility to T2D.

[0114] In another embodiment of the invention, diagnosis of a susceptibility to T2D can also be made by examining expression and/or structure and/or function of a T2D susceptibility polypeptide. A test sample from an individual is assessed for the presence of an alteration in the expression and/or an alteration in structure and/or function of the polypeptide encoded by a T2D risk gene, or for the presence of a particular polypeptide variant (e.g., an isoform) encoded by a T2D risk gene. An alteration in expression of a polypeptide encoded by a T2D risk gene can be, for example, quantitative (an alteration in the quantity of the expressed polypeptide, i.e., the amount of polypeptide produced) or qualitative (an alteration in the structure and/or function of a polypeptide encoded by a T2D risk gene, i.e. expression of a mutant T2D susceptibility polypeptide or of a different splicing variant or isoform). In a preferred embodiment, detecting a particular splicing variant encoded by a T2D risk gene or a particular pattern of splicing variants makes diagnosis of the disease or condition associated with T2D or a susceptibility to a disease or condition associated with T2D.

[0115] Alterations in expression and/or structure and/or function of a T2D susceptibility polypeptide can be determined by various methods known in the art e.g. by assays based on chromatography, spectroscopy, colorimetry, electrophoresis, isoelectric focusing, specific cleavage, immunologic techniques and measurement of biological activity as well as combinations of different assays. An “alteration” in the polypeptide expression or composition, as used herein, refers to an alteration in expression or composition in a test sample, as compared with the expression or composition in a control sample and an alteration can be assessed either directly from the T2D susceptibility polypeptide or it's fragment or from substrates and reaction products of said polypeptide. A control sample is a sample that corresponds to the test sample (e.g., is from the same type of cells), and is from an individual who is not affected by T2D. An alteration in the expression or composition of a polypeptide encoded by a T2D susceptibility gene of the invention in the test sample, as compared with the control sample, is indicative of a susceptibility to T2D.

[0116] Western blotting analysis, using an antibody as described above that specifically binds to a polypeptide encoded by a mutant T2D risk gene or an antibody that specifically binds to a polypeptide encoded by a non-mutant gene, or an antibody that specifically binds to a particular splicing variant encoded by a T2D risk gene can be used to identify the presence or absence in a test sample of a particular polypeptide encoded by a polymorphic or mutant T2D risk gene. The presence of a polypeptide encoded by a polymorphic or mutant gene, or the absence of a polypeptide encoded by a non-polymorphic or non-mutant gene, is diagnostic for a susceptibility to T2D, as is the presence (or absence) of particular splicing variants encoded by a T2D risk gene.

[0117] In one embodiment of this method, the level or amount of a polypeptide encoded by a T2D risk gene in a test sample is compared with the level or amount of the same polypeptide encoded by the same T2D risk gene in a control sample. A level or amount of the polypeptide in the test sample that is higher or lower than the level or amount of the polypeptide in the control sample, such that the difference is statistically significant, is indicative of an alteration in the expression of the polypeptide encoded by a T2D risk gene, and is diagnostic for a susceptibility to T2D. Alternatively, the composition of the polypeptide encoded by a T2D risk gene in a test sample is compared with the composition of the polypeptide encoded by a T2D risk gene in a control sample (e.g., the presence of different splicing variants). A difference in the composition of the polypeptide in the test sample, as compared with the composition of the polypeptide in the control sample, is diagnostic for a susceptibility to T2D. In another embodiment, both the level or amount and the composition of the polypeptide can be assessed in the test sample and in the control sample. A difference in the amount or level of the polypeptide in the test sample, compared to the control sample; a difference in composition in the test sample, compared to the control sample; or both a difference in the amount or level, and a difference in the composition, is indicative of a susceptibility to T2D.

[0118] In another embodiment, assessment of the splicing variant or isoform(s) of a polypeptide encoded by a polymorphic or mutant T2D risk gene can be performed. The assessment can be performed directly (e.g., by examining the polypeptide itself), or indirectly (e.g., by examining the mRNA encoding the polypeptide, such as through mRNA profiling). For example, probes or primers as described herein can be used to determine which splicing variants or isoforms are encoded by a T2D risk gene mRNA, using standard methods.

[0119] The presence in a test sample of a particular splicing variant(s) or isoform(s) associated with T2D or risk of T2D, or the absence in a test sample of a particular splicing variant(s) or isoform(s) not associated with T2D or risk of T2D, is diagnostic for a disease or condition associated with a T2D risk gene or a susceptibility to a disease or condition associated with a T2D risk gene. Similarly, the absence in a test sample of a particular splicing variant(s) or isoform(s) associated with T2D or risk of T2D, or the presence in a test sample of a particular splicing variant(s) or isoform(s) not associated with T2D or risk of T2D, is diagnostic for the absence of disease or condition associated with a T2D risk gene or a susceptibility to a disease or condition associated with a T2D risk gene.

[0120] The invention further pertains to a method for the diagnosis and identification of susceptibility to T2D in an individual, by assessing markers present in at-risk alleles or at-risk haplotypes of T2D risk genes. In one embodiment, the at-risk allele or the at-risk haplotype is an allele or a haplotype for which the presence of the allele or the haplotype increases the risk of T2D significantly. Although it is to be understood that identifying whether a risk is significant may depend on a variety of factors, including the specific disease, the haplotype, and often, environmental factors, the significance may be measured by an odds ratio or a percentage. In a further embodiment, the significance is measured by a percentage. In one embodiment, a significant risk is measured as an odds ratio of 0.8 or less or at least about 1.2, including by not limited to: 0.1, 0.2, 0.3, 0.4, 0.5, 0.6, 0.7, 0.8, 1.2, 1.3, 1.4, 1.5, 1.6, 1.7, 1.8, 1.9, 2.0, 2.5, 3.0, 4.0, 5.0, 10.0, 15.0, 20.0, 25.0, 30.0 and 40.0. In a further embodiment, an odds ratio of at least 1.2 is significant. In a further embodiment, an odds ratio of at least about 1.5 is significant. In a further embodiment, a significant increase or decrease in risk is at least about 1.7. In a further embodiment, a significant increase in risk is at least about 20%, including but not limited to about 25%, 30%, 35%, 40%, 45%, 50%, 55%, 60%, 65%, 70%, 75%, 80%, 85%, 90%, 95% and 98%. In a further embodiment, a significant increase or reduction in risk is at least about 50%. It is understood however, that identifying whether a risk is medically significant may also depend on a variety of factors, including the specific disease, the allele or the haplotype, and often, environmental factors.

[0121] The invention also pertains to methods of diagnosing risk or a susceptibility to T2D in an individual, comprising screening for an at-risk haplotype in a T2D risk gene that is more frequently present in an individual susceptible to T2D (affected), compared to the frequency of its presence in a healthy individual (control), wherein the presence of the haplotype is indicative of risk or susceptibility to T2D.

[0122] Yet in another embodiment, a susceptibility to T2D can be diagnosed by assessing the status and/or function of biological networks and/or metabolic pathways related to one or several polypeptides encoded by T2D risk genes of this invention. Status and/or function of a biological network and/or a metabolic pathway can be assessed e.g. by measuring amount or composition of one or several polypeptides or metabolites belonging to the biological network and/or to the metabolic pathway from a biological sample taken from a subject. Risk to develop a T2D is evaluated by comparing observed status and/or function of biological networks and or metabolic pathways of a subject to the status and/or function of biological networks and or metabolic pathways of healthy controls.

[0123] Kits (e.g., reagent kits) useful in the methods of diagnosis comprise components useful in any of the methods described herein, including for example, PCR primers, hybridization probes or primers as described herein (e.g., labeled probes or primers), reagents for genotyping SNP markers, reagents for detection of labeled molecules, restriction enzymes (e.g., for RFLP analysis), allele-specific oligonucleotides, DNA polymerases, RNA polymerases, marker enzymes, antibodies which bind to altered or to non-altered (native) T2D susceptibility polypeptide, means for amplification of nucleic acids comprising one or several T2D risk genes, or means for analyzing the nucleic acid sequence of one or several T2D risk genes or for analyzing the amino acid sequence of one or several T2D susceptibility polypeptides, etc. In one embodiment, a kit for diagnosing susceptibility to T2Dcan comprise primers for nucleic acid amplification of fragments from a T2D risk gene comprising markers defining an at-risk haplotype that is more frequently present in an individual susceptible to T2D. The primers can be designed using portions of the nucleic acid sequence flanking SNPs that are indicative of T2D.

[0124] This invention is based on the principle that one or a small number of genotype analyses are performed, and the mutations to be typed are selected on the basis of their ability to predict T2D. For this reason any method to genotype mutations in a genomic DNA sample can be used. If non-parallel methods such as real-time PCR are used, the genotype analyses are done in a row. The PCR reactions may be multiplexed or carried out separately in a row or in parallel aliquots.

[0125] Thus, the detection method of the invention may further comprise a step of combining information concerning age, gender, smoking status, physical activity, waist-to-hip circumference ratio (cm/cm), the subject family history of T2D or obesity, history of gestational diabetes, previously identified glucose intolerance, obesity, hypertriglyceridemia, low HDL cholesterol, HT and elevated BP. The detection method of the invention may also further comprise a step determining blood, serum or plasma glucose, total cholesterol, HDL cholesterol, LDL cholesterol, triglyceride, apolipoprotein B and Al, fibrinogen, ferritin, transferrin receptor, C-reactive protein, serum or plasma insulin concentration.

[0126] The score that predicts the probability of T2D may be calculated e.g. using a multivariate failure time model or a logistic regression equation. The results from the further steps of the method as described above render possible a step of calculating the probability of T2D using a logistic regression equation as follows.

[0127] Probability of T2D=1/[1+e(−(−a+Σ(bi*Xi))], where e is Napier's constant, Xi are variables related to the T2D, bi are coefficients of these variables in the logistic function, and a is the constant term in the logistic function, and wherein a and bi are preferably determined in the population in which the method is to be used, and Xi are preferably selected among the variables that have been measured in the population in which the method is to be used. Preferable values for bᵢ are between −20 and 20; and for i between 0 (none) and 100,000. A negative coefficient bi implies that the marker is risk-reducing and a positive that the marker is risk-increasing. Xi are binary variables that can have values or are coded as 0 (zero) or 1 (one) such as SNP markers. The model may additionally include any interaction (product) or terms of any variables Xi, e.g. biXi. An algorithm is developed for combining the information to yield a simple prediction of T2D as percentage of risk in one year, two years, five years, 10 years or 20 years. Alternative statistical models are failure-time models such as the Cox's proportional hazards' model, other iterative models and neural networking models.

[0128] The test can be applied to test the risk of developing a T2D in both healthy persons, as a screening or predisposition test and high-risk persons (who have e.g. family history of T2D or history of gestational diabetes or previous glucose intolerance or obesity or any combination of these or elevated level of any other T2D risk factor).

[0129] The method can be used in the prediction and early diagnosis of T2D in adult persons, stratification and selection of subjects in clinical trials, stratification and selection of persons for intensified preventive and curative interventions. The aim is to reduce the cost of clinical drug trials and health care.

[0130] Monitoring Progress of Treatment

[0131] The current invention also pertains to methods of monitoring the effectiveness of a treatment of T2D based on the expression (e.g., relative or absolute expression) of one or more T2D risk genes. The T2D risk susceptibility gene mRNA, or polypeptide it is encoding or biological activity of the encoded polypeptide can be measured in a tissue sample (e.g. peripheral blood sample or adipose tissue biopsy). An assessment of the levels of expression or biological activity of the polypeptide can be made before and during treatment with T2D therapeutic agents.

[0132] Alternatively the effectiveness of a treatment of T2D can be followed by assessing the status and/or function of biological networks and/or metabolic pathways related to one or several polypeptides encoded by T2D risk genes of this invention. Status and/or function of a biological network and/or a metabolic pathway can be assessed e.g. by measuring amount or composition of one or several polypeptides, belonging to the biological network and/or to the metabolic pathway, from a biological sample taken from a subject before and during a treatment. Alternatively status and/or function of a biological network and/or a metabolic pathway can be assessed by measuring one or several metabolites belonging to the biological network and/or to the metabolic pathway, from a biological sample before and during a treatment. Effectiveness of a treatment is evaluated by comparing observed changes in status and/or function of biological networks and or metabolic pathways following treatment with T2D therapeutic agents to the data available from healthy subjects.

[0133] For example, in one embodiment of the invention, an individual who is a member of the target population can be assessed for response to treatment with an T2D inhibitor, by examining T2D risk gene encoding polypeptide biological activity or absolute and/or relative levels of T2D risk gene encoding polypeptide or mRNA in peripheral blood in general or in specific cell fractions or in a combination of cell fractions.

[0134] In addition, variations such as SNP markers defining haplotypes or mutations within or near (e.g. within 1 to 200 kb) of the T2D risk gene may be used to identify individuals who are at higher risk for T2D to increase the power and efficiency of clinical trials for pharmaceutical agents to prevent or treat T2D or their complications. The presence of at-risk haplotypes and other variations may be used to exclude or fractionate patients in a clinical trial who are likely to have involvement of another pathway in their T2D in order to enrich patients who have pathways involved that are relevant regarding to the treatment tested and boost the power and sensitivity of the clinical trial. Such variations may be used as a pharmacogenetic test to guide the selection of pharmaceutical agents for individuals.

[0135] This application includes sequence listing and tables that are submitted in electronic form. The sequence listing and tables are submitted herewith on one original and one duplicate compact disc (in compliance with 37 C.F.R. § 1.52(e)) designated respectively as Copy 1 and Copy 2, and labeled in compliance with 37 C.F.R. § 1.52(e)(6). All the material in the sequence listing and tables on compact disc is hereby incorporated in their entirety herein by reference, and identified by the following data of file names, creation date and size in bytes:

| FILE NAME | CREATED | SIZE IN BYTES |
|---|---|---|
| Sequence listing.txt | 05-Dec-05 | 684 000 |
| Table1_T2D.txt | 05-Dec-05 | 144 000 |
| Table2_T2D.txt | 14-Nov-05 | 76 700 |
| Table3_T2D.txt | 14-Nov-05 | 100 000 |
| Table4_T2D.txt | 14-Nov-05 | 10 300 |
| Table5_T2D.txt | 14-Nov-05 | 115 000 |
| Table6_T2D.txt | 14-Nov-05 | 116 000 |
| Table7_T2D.txt | 14-Nov-05 | 26 300 |
| Table8_T2D.txt | 09-Dec-05 | 86 200 |
| Table9_T2D.txt | 09-Dec-05 | 83 300 |
| Table10_T2D.txt | 09-Dec-05 | 69 500 |
| Table11_T2D.txt | 12-Dec-05 | 3 050 |
| Table12_T2D.txt | 12-Dec-05 | 3 130 |
| Table13_T2D.txt | 20-Dec-05 | 53 900 |

[0136] Experimental Section

[0137] Study Populations: The KIHD and NSP Cohorts

[0138] KIHD: The Kuopio Ischaemic Heart Disease Risk Factor Study (KIHD) is an ongoing prospective population-based cohort study, which was designed to investigate genetic and other risk factors for cardiovascular and metabolic diseases and related outcomes in the East Finland founder population, known for its genetic homogeneity and high occurrence of CHD (Salonen J T 1988, Salonen J T et al 1998, 1999, Tuomainen T-P et al 1999).

[0139] The study population was a random age-stratified sample of men living in Eastern Finland who were 42, 48, 54 or 60 years old at baseline examinations in 1984-1989. A total of 2682 men were examined during 1984-89. The male cohort was complemented by a random population sample of 920 women, first examined during 1998-2001, at the time of the 11-year follow up of the male cohort. The recruitment and examination of the subjects has been described previously in detail (Salonen J T, 1988). The University of Kuopio and University Hospital Ethics Committee approved the study. All participants gave their written informed consent.

[0140] NSP: In addition to the existing KIHD cohort, a large population cohort was examined in 2003 in Eastern Finland. This “North Savo Project” (NSP) includes the collection of disease, family, drug response and contact information. By October 2004, 17,100 participants have been surveyed. The study consists of the identification of probands with T2D, the collection of blood for DNA extraction and consent to use it. In the second phase, patients with T2D and T2D-free controls were examined.

[0141] Definition of Cases and Controls

[0142] The subjects of the present study were participants in either the KIHD or the NSP. In the KIHD, fasting blood glucose was measured using a glucose dehydrogenase method after precipitation of proteins by trichloroacetic acid. Serum insulin was determined with a Novo Biolabs radioimmunoassay kit (Novo Nordisk). In the NSP, prevalent diabetes was assessed by medication review and fasting blood glucose level, obtained from whole blood samples after at least 12 hours of overnight fasting and measured with the glucose dehydrogenase method after precipitation of the proteins with trichloroacetic acid (Granutest 100, Merck). A person was considered diabetic if he/she currently used diet or took medication to control blood glucose or if he/she had a fasting blood glucose level of >6.7 mmol/L (120 mg/dL).

[0143] The cases had T2D and family history of T2D. All T2D cases (probands) had at least one additional affected relative, who was parent, sibling or offspring of the proband. Most of them had more than one additional affected family member. The controls had neither T2D nor family history of T2D. During the first phase of the study 93 cases and 157 controls were analyzed (first analysis) using the technology access version or commercial version of Affymetrix GeneChip® Human Mapping 100 k assay. In the second phase of the study 30 cases and 29 controls were added, so that a second analysis was based on a set of 123 and 186 controls using either the technology access version or a commercial version of Affymetrix GeneChip® Human Mapping 100 k assay. The third analysis was based on 80 cases and 30 controls (who were included in the second analysis) using only the commercial version of Affymetrix GeneChip® Human Mapping 100 k assay. Combined results from the analyses are presented in the results section.

[0144] Other Phenotypic Measurements

[0145] Age and tobacco smoking were recorded on a self-administered questionnaire checked by an interviewer. HDL fractions were separated from fresh serum by combined ultracentrifugation and precipitation. The cholesterol contents of lipoprotein fractions and serum triglycerides were measured enzymatically. Both systolic and diastolic BPs were measured in the morning by a nurse with a random-zero mercury sphygmomanometer. The measuring protocol included three measurements in supine, one in standing and two in sitting position with 5-minutes intervals. The mean of all six measurements were used as SBP and DBP (Salonen J T et al, 1998). Body mass index (BMI) was computed as the ratio of weight to the square of height (kg/m 2). Waist-to-hip ratio (WHR) was calculated as the ratio of waist circumference (average of one measure taken after inspiration and one taken after expiration at the midpoint between the lowest rib and the iliac crest) to hip circumference (measured at the level of the trochanter major).

[0146] Genomic DNA Isolation and Quality Testing

[0147] High molecular weight genomic DNA samples were extracted from frozen venous whole blood using standard methods and dissolved in standard TE buffer. The quantity and purity of each DNA sample was evaluated by measuring the absorbance at 260 and 280 nm and integrity of isolated DNA samples was evaluated with 0.9% agarose gel electrophoresis and Ethidiumbromide staining. A sample was qualified for genome wide scan (GWS) analysis if A260/A280 ratio was ≧1.7 and/or average size of isolated DNA was over 20 kb in agarose gel electrophoresis. Before GWS analysis samples were diluted to concentration of 50 ng/μl in reduced EDTA TE buffer (TEKnova).

[0148] Genome-Wide Scan

[0149] Genotyping of SNP markers was performed by using either the technology access version or a commercial version of Affymetrix GeneChip® Human Mapping 100 k assay. The assay consisted of two arrays, Xba and Hind, which were used to genotype over 100,000 SNP markers from each DNA sample. The assays were performed according to the instructions provided by the manufacturer. A total of 250 ng of genomic DNA was used for each individual assay. DNA sample was digested with either Xba I or Hind III enzyme (New England Biolabs, NEB) in the mixture of NE Buffer 2 (1×; NEB), bovine serum albumin (1×; NEB), and either Xba I or Hind III (0.5 U/μl; NEB) for 2 h at +37° C. followed by enzyme inactivation for 20 min at +70° C. Xba I or Hind III adapters were then ligated to the digested DNA samples by adding Xba or Hind III adapter (0.25 μM, Affymetrix), T4 DNA ligase buffer (1×; NEB), and T4 DNA ligase (250 U; NEB). Ligation reactions were allowed to proceed for 2 h at +16° C. followed by 20 min incubation at +70° C. Each ligated DNA sample was diluted with 75 μl of molecular biology-grade water (BioWhittaker Molecular Applications/Cambrex).

[0150] Diluted ligated DNA samples were subjected to three to four identical 100 μl volume polymerase chain reactions (PCR) by implementing a 10 μl aliquot of DNA sample with Pfx Amplification Buffer (1×; Invitrogen), PCR Enhancer (1×; Invitrogen), MgSO₄ (1 mM; Invitrogen), dNTP (300 μM each; Takara), PCR primer (1 μM; Affymetrix), and Pfx Polymerase (0.05 U/el; Invitrogen). The PCR was allowed to proceed for 3 min at +94° C, followed by 30 cycles of 15 sec at +94° C., 30 sec at +60° C., 60 sec at +68° C., and finally for the final extension for 7 min at +68° C. The performance of the PCR was checked by standard 2% agarose gel electrophoresis in 1×TBE buffer for 1 h at 120V.

[0151] PCR products were purified according to Affymetrix manual using MinElute 96 UF PCR Purification kit (Qiagen) by combining all three to four PCR products of an individual sample into same purification reaction. The purified PCR products were eluted with 40 μl of EB buffer (Qiagen), and the yields of the products were measured at the absorbance 260 nm. A total of 40 μg of each PCR product was then subjected to fragmentation reaction consisting of 0.2 U of fragmentation reagent (Affymetrix) in 1× Fragmentation Buffer. Fragmentation reaction was allowed to proceed for 35 min at +37° C. followed by 15 min incubation at +95° C. for enzyme inactivation. Completeness of fragmentation was checked by running an aliquot of each fragmented PCR product in 4% TBE gel (4% NuSieve 3:1 Plus Agarose; BMA Reliant precast) for 30-45 min at 120V.

[0152] Fragmented PCR products were then labelled using 1× Terminal Deoxinucleotidyl Transferase (TdT) buffer (Affymetrix), GeneChip DNA Labeling Reagent (0.214 mM; Affymetrix), and TdT (1.5 U/μl; Affymetrix) for 2 h at +37° C. followed by 15 min at +95° C. Labeled DNA samples were combined with hybridization buffer consisting of 0.056 M MES solution (Sigma), 5% DMSO (Sigma), 2.5× Denhardt's solution (Sigma), 5.77 mM EDTA (Ambion), 0.115 mg/ml Herring Sperm DNA (Promega), 1× Oligonucleotide Control reagent (Affymetrix), 11.5 μg/ml Human Cot-1 (Invitrogen), 0.0115% Tween-20 (Pierce), and 2.69 M Tetramethyl Ammonium Chloride (Sigma). DNA-hybridization buffer mix was denatured for 10 min at +95° C., cooled on ice for 10 sec and incubated for 2 min at +48° C. prior to hybridization onto corresponding Xba or Hind GeneChip(V array. Hybridization was completed at +48° C. for 16-18 h at 60 rpm in an Affymetrix GeneChip Hybridization Oven. Following hybridization, the arrays were stained and washed in GeneChip Fluidics Station 450 according to fluidics station protocol Mapping10Kv1_{—}450 (technology access version arrays) or Mapping100Kv1_{—}450 (commercial version arrays) as recommended by the manufacturer. Arrays were scanned with GeneChip 3000 Scanner, and the genotype calls for each of the SNP markers on the array were generated using Affymetrix Genotyping Tools (GTT) software (technology access version arrays, confidence score in SNP calling algorithm was adjusted to 0.20) or using GeneChip DNA Analysis Software 2.0 (GDAS) (commercial version arrays) with standard settings provided by the manufacturer.

[0153] Initial SNP Selection for Statistical Analysis

[0154] Prior to the statistical analysis, SNP quality was assessed on the basis of three values: the call rate (CR), minor allele frequency (MAF), and Hardy-Weinberg equilibrium (H-W). The CR is the proportion of samples genotyped successfully. It does not take into account whether the genotypes are correct or not. The call rate was calculated as: CR=number of samples with successful genotype call/total number of samples. The MAF is the frequency of the allele that is less frequent in the study sample. MAF was calculated as: MAF=min(p, q), where p is frequency of the SNP allele ‘A’ and q is frequency of the SNP allele ‘B’; p=(number of samples with “AA”-genotype+0.5*number of samples with “AB”-genotype)/total number of samples with successful genotype call; q=1−p. SNPs that are homozygous (MAF=0) cannot be used in genetic analysis and were thus discarded. H-W equilibrium is tested for controls. The test is based on the standard Chi-square test of goodness of fit. The observed genotype distribution is compared with the expected genotype distribution under H-W equilibrium. For two alleles this distribution is p2, 2pq, and q2 for genotypes ‘AA’, ‘AB’ and ‘BB’, respectively. If the SNP is not in H-W equilibrium it can be due to genotyping error or some unknown population dynamics (e.g. random drift, selection).

[0155] Based on the control group, only the SNPs that had CR>50%, MAF>1%, and were in H-W equilibrium (Chi-square test statistic <23.93) were used in the statistical analysis. A total of 100,848 SNPs fulfilled the above criteria and were included in the statistical analysis.

[0156] Statistical Methods

[0157] Single SNP Analysis

[0158] Differences in allele distributions between cases and controls were screened for all SNPs. The screening was carried out using the standard Chi-square independence test with 1 df (allele distribution, 2×2 table). SNPs that gave a P-value less than 0.005 (Chi-square distribution with 1 df of 7.88 or more) were considered as statistically significant and reported in the table 1. Odds ratio was calculated as ad/bc, where a is the number of minor alleles in cases, b is the number of major alleles in cases, c is the number of minor allele in controls, and d is the number of major alleles in controls. Minor allele was defined as the allele for a given SNP that has smaller frequency than the other allele in the control group.

[0159] Haplotype Analysis

[0160] The data set was analyzed with a haplotype pattern mining algorithm with HPM software (Toivonen HT et al, 2000). For HPM software, genotypes must be phase known to determine which alleles come from the mother and which from the father. Without family data, phases must be estimated based on population data. We used HaploRec-program (Eronen L et al, 2004) to estimate the phases. HPM is very fast and can handle a large number of SNPs in a single run

[0161] For phase-known data HPM finds all haplotype patterns that are in concordance with the phase configuration. The length of the haplotype patterns can vary. As an example, if there are four SNPs and an individual has alleles A T for SNP1, C C for SNP2, C G for SNP3, and A C for SNP4, then HPM considers haplotype patterns that are in concordance with the estimated phase (done by HaploRec). If the estimated phase is ACGA (from the mother/father) and TCCC (from the father/mother) then HPM considers only two patterns (of length 4 SNPs): ACGA and TCCC.

[0162] A SNP is scored based on the number of times it is included in a haplotype pattern that differs between cases and controls (a threshold Chi-square value can be selected by the user). Significance of the score values is tested based on permutation tests.

[0163] Several parameters can be modified in the HPM program including the Chi-square threshold value (−x), the maximum haplotype pattern length (−l), the maximum number of wildcards that can be included in a haplotype pattern (−w), and the number of permutation tests in order to estimate the P-value (−p). Wildcards allow gaps in haplotypes. HaploRec+ HPM was run with the following parameter settings: haplotype analysis with 5 SNPs (−x9−l5−w1−p1000) and haplotype analysis with 8 SNPs (−x9−l8−w1−p10000). HaploRec+HPM was based on the order of the SNP given in dbSNP124. Based on 10,000 replicates (−p10000) SNPs that gave a P-value less than 0.005 were considered as statistically significant and reported in tables 2-7.

[0164] Definition of Terms Used in the Haplotype Analysis Results

[0165] The term “haplotype genomic region” or “haplotype region” refers to a genomic region that has been found significant in the haplotype analysis (HPM or similar statistical method/program). The haplotype region is defined as 100 Kbp up/downstream from the physical position of the first/last SNP that was included in the statistical analysis (haplotype analysis) and was found statistically significant. This region is given in base pairs based on the given genome build e.g. SNP physical position (base pair position) according to NCBI Human Genome Build 35.

[0166] The term “haplotype” as described herein, refers to any combination of alleles e.g. C A G G that is found in the given genetic markers e.g rs1418754, rs2797573, rs787663, rs10509650. A defined haplotype gives the name of the genetic markers (dbSNP rs-id for the SNPs) and the alleles. As it is recognized by those skilled in the art, the same haplotype can be described differently by determining alleles from different strands e.g. the haplotype rs1418754, rs2797573, rs787663, rs10509650 (C A G G) is the same as haplotype rs1418754, rs2797573, rs787663, rs10509650 (G T C C) in which the alleles are determined from the other strand, or haplotype rs1418754, rs2797573, rs787663, rs10509650 (G A G G), in which the first allele is determined from the other strand.

[0167] The haplotypes described herein, e.g. having markers such as those shown in tables 2-7, are found more frequently in individuals with T2D than in individuals without T2D. Therefore, these haplotypes have predictive value for detecting T2D or a susceptibility to T2D in an individual. Therefore, detecting haplotypes can be accomplished by methods known in the art for detecting sequences at polymorphic sites.

[0168] It is understood that the T2D associated at-risk alleles and at-risk haplotypes described in this invention may be associated with other “polymorphic sites” located in T2D associated genes of this invention. These other T2D associated polymorphic sites may be either equally useful as genetic markers or even more useful as causative variations explaining the observed association of at-risk alleles and at-risk haplotypes of this invention to T2D.

[0169] Results

[0170] In table 1 are summarized the characteristics of the SNP markers with the strongest association with T2D in the individual marker analysis combined from both the first and second genome scans. SNP identification number according to NCBI dbSNP database build 124. SNP physical position according to NCBI Human Genome Build 35.1. Gene locus as, reported by NCBI dbSNP database build 124. SNP flanking sequence provided by Affymetrix “csv” commercial Human Mapping 100K array annotation files. The genes positioned within 100 Kbp up/downstream from the physical position of the SNPs are provided based on the NCBI Human Genome Build 35.1.

[0171] In table 2 are summarized the characteristics of the haplotype genomic regions with the strongest association with T2D in the haplotype sharing analysis with 5 SNPs (HaploRec+HPM) from the analysis of the first genome scan. SNP identification number according to NCBI dbSNP database build 124. SNP physical position according to NCBI Human Genome Build 35.1. Haplotype gene content, genes positioned within 100 Kbp up/downstream from the physical position of the SNPs bordering the haplotype genomic region found using NCBI MapViewer, based on NCBI Human Genome Build 35.1. SNP flanking sequence provided by Affymetrix “csv” commercial Human Mapping 100K array annotation files.

[0172] In table 3 are summarized the characteristics of the haplotype genomic regions with the strongest association with T2D in the haplotype sharing analysis with 8 SNPs (HaploRec+HPM) from the analysis of the first genome scan. Annotation information as in table 2.

[0173] In table 4 are listed haplotype block regions and corresponding at-risk haplotypes with the strongest association with T2D based on the Chi-square value from the first genome scan. The Chi-square value is calculated using the 2×2 Chi-square test with the cells containing the number of individuals 1) carrying the at-risk haplotype and having T2D, 2) carrying the at-risk haplotype and not having T2D, 3) not carrying the at-risk haplotype and having T2D, and 4) not carrying the at-risk haplotype and not having T2D. SNP identification number according to NCBI dbSNP database build 124.

[0174] In table 5 are summarized the characteristics of the haplotype genomic regions with the strongest association with T2D in the haplotype sharing analysis with 5 SNPs (HaploRec+HPM) from the analysis of the second genome scan. Annotation information as in table 2.

[0175] In table 6 are summarized the characteristics of the haplotype genomic regions with the strongest association with T2D in the haplotype sharing analysis with 8 SNPs (HaploRec+HPM) from the analysis of the second genome scan. Annotation information as in table 2.

[0176] In table 7 are listed haplotype block regions and corresponding at-risk haplotypes with the strongest association with T2D based on the Chi-square value from the second genome scan. The Chi-square value is calculated as for table 4.

[0177] In table 8 are summarized the characteristics of the SNP markers with the strongest association with T2D in the individual marker analysis from both the third genome scan. Annotation information as in table 1.

[0178] In table 9 are summarized the characteristics of the haplotype genomic regions with the strongest association with T2D in the haplotype sharing analysis with 5 SNPs (HaploRec+HPM) from the analysis of the third genome scan. Annotation information as in table 2.

[0179] In table 10 are summarized the characteristics of the haplotype genomic regions with the strongest association with T2D in the haplotype sharing analysis with 8 SNPs (HaploRec+HPM) from the analysis of the third genome scan. Annotation information as in table 2.

[0180] In table 11 and 12 are presented results of a multivariate logistic model predicting T2D. The model is adjusted for the type of microarray used i.e. whether the samples were analyzed with the early access Affymetrix 100K or with the commercial version of the Affymetrix 100K array, by including a dummy (0, 1) variable. The risk allele was considered as independet variable in the regression model. The coding of SNPs: 0, 1, 2, where code 2 denotes homozygocity of the minor allele, code 1 heterozygocity and code 0 homozygocity of non-minor allele. Annotation information as in previous tables.

[0181] In table 13 are listed all genes found associated with T2D according to point wise and haplotype analyses in all three genome scans. Gene name according to HUGO Gene Nomenclature Committee (HGNC).

[0182] Implications and Conclusions

[0183] We have found 4685 SNP markers associated with T2D in a population-based set of familial cases and healthy controls without family history. Of these, 1637 were identified in the analysis of individual SNPs and 3751 in the haplotype sharing analysis. Of the 4685 markers, 703 predicted T2D in both types of statistical analysis. Of the 4685 SNP markers associated with the risk of T2D 2407 SNP markers were intragenic.

[0184] The results of the point wise and haplotype analyses identified a total of 3048 genes associated with T2D, of which 903 genes had at least one of the 4685 SNP markers physically linked to the gene.

[0185] Thus, we have discovered a total of 3048 T2D genes, in which any genetic marker can be used to predict T2D, and thus these markers can be used as part of molecular diagnostic tests of T2D predisposition. In addition, we have disclosed a set of 4685 SNP markers which are predictive of T2D. The markers can also be used as part of pharmacogenetic tests which predict the efficacy and adverse reactions of antihyperglicemic agents and compounds. The genes discovered are also targets to new therapies of T2D, such as drugs. Other therapies are molecular, including gene transfer. The new genes can also be used to develop and produce new transgenic animals for studies of antihypertensive agents and compounds.

[0186] While this invention has been particularly shown and described with reference to preferred embodiments thereof, it will be understood by those skilled in the art that various changes in form and details may be made therein without departing from the spirit and scope of the invention as defined by the appended claims.

### REFERENCES

[0187] Altshuler D, Hirschhorn J N, Klannemark M, Lindgren C M, Vohl M C, et al. 2000. The common PPARgamma Pro12Ala polymorphism is associated with decreased risk of type 2 diabetes. Nat. Genet. 26:76-80.
[0188] American Diabetes Association. 2003. Report of the Expert Committee on the Diagnosis and Classification of Diabetes Mellitus. Diabetes Care 26:S5-S20.
[0189] Barnett A H, Eff C, Leslie R D, Pyke D A. 1981. Diabetes in identical twins. A study of 200 pairs. Diabetologia 20:87-93.
[0190] Bell G I, Xiang K, Newman M V, Wu S, Wright L G, Fajans S S, Spielman R S, Cox N J. 1991. Gene for non-insulin-dependent diabetes mellitus (maturity-onset diabetes of the young subtype) is linked to DNA polymorphism on human chromosome 20q. Proc Natl Acad Sci 88:1484-1488.
[0191] Berg A H, Combs T P, Scherer P E. 2002. ACRP30/adiponectin: an adipokine regulating glucose and lipid metabolism. Trends Endocrinol Metab. 13:84-9.
[0192] Bierer B, Coligan J E, Margulies D H, Shevach E M, Strober W. 2002. Current Protocols in Immunology. NY:John Wiley & Sons.
[0193] Boden G. 2001. Free fatty acids-the link between obesity and insulin resistance. Endocr Pract. 7:44-51.
[0194] Buchanan T A.2003. Pancreatic beta-cell loss and preservation in type 2 diabetes. Clin Ther. 25 Suppl B:B32-46.
[0195] Byrne M M, Sturis J, Menzel S, Yamagata K, Fajans S S, Dronsfield M J, Bain S C, Hattersley A T, Velho G, Froguel P, Bell G I, Polonsky K S. 1996. Altered insulin secretory response to glucose in diabetic and nondiabetic subjects with mutations in the diabetes susceptibility gene MODY3 on chromosome 12. Diabetes 45:1503-1510.
[0196] Chiu K C, Province M A, Dowse G K, Zimmet P Z, Wagner G, et al. 1992. A genetic marker at the glucokinase gene locus for type 2 (non-insulin-dependent) diabetes mellitus in Mauritian Creoles. Diabetologia 35:632-38.
[0197] Clement K, Pueyo M E, Vaxillaire M, Rakotoambinina B, Thuillier F, Passa P, Froguel P, Roberts J, Velho G. 1996. Assessment of insulin sensitivity in glucokinase-deficient subjects. Diabetologia 39:82-90.
[0198] Cole S P, Campling B G, Atlaw T, Kozbor D, Roder J C. 1984. Human monoclonal antibodies. Mol Cell Biochem. 62:109-20.
[0199] Damcott C M, Moffett S P, Feingold E, Barmada M M, Marshall J A, Hamman R F, Ferrell R E. 2004. Genetic variation in fatty acid-binding protein-4 and peroxisome proliferator-activated receptor gamma interactively influence insulin sensitivity and body composition in males. Metabolism. 53:303-9.
[0200] Dandona P, Aljada A, Bandyopadhyay A. 2004. Inflammation: the link between insulin resistance, obesity and diabetes. Trends Immunol. 25:4-7.
[0201] Deeb S S, Fajas L, Nemoto M, Pihlajamaki J, Mykkanen L, et al. 1998. A Pro12Ala substitution in PPARgamma2 associated with decreased receptor activity, lower body mass index and improved insulin sensitivity. Nat. Genet. 20:284-87.
[0202] Demenais F, Kanninen T, Lindgren C M, Wiltshire S, Gaget S, Dandrieux C, Almgren P, Sjogren M, Hattersley A, Dina C, Tuomi T, McCarthy M I, Froguel P, Groop L C. 2003. A meta-analysis of four European genome screens (GIFT Consortium) shows evidence for a novel region on chromosome 17p11.2-q22 linked to type 2 diabetes. Hum Mol Genet. 12:1865-73.
[0203] Dickson L M, Rhodes C J. 2004. Pancreatic beta-cell growth and survival in the onset of type 2 diabetes: a role for protein kinase B in the Akt? Am J Physiol Endocrinol Metab. 287:E192-8.
[0204] Eriksson J G, Lindi V, Uusitupa M, Forsen T J, Laakso M, Osmond C, Barker D J. 2002. The effects of the Pro12Ala polymorphism of the peroxisome proliferator-activated receptor-gamma2 gene on insulin sensitivity and insulin metabolism interact with size at birth. Diabetes. 51:2321-4.
[0205] Eronen L, Geerts F, Toivonen H. 2004. A Markov chain approach to reconstruction of long haplotypes. Pac Symp Biocomput.:104-15.
[0206] Florez J C, Hirschhorn J, Altshuler D. 2003. The inherited basis of diabetes mellitus: implications for the genetic analysis of complex traits. Annu Rev Genomics Hum Genet 4:257-91.
[0207] Froguel P, Vaxillaire M, Sun F, Velho G, Zouali H, Butel M O, Lesage S, Vionnet N, Clement K, Fougerousse F, et al. 1992. Close linkage of glucokinase locus on chromosome 7p to early-onset non-insulin-dependent diabetes mellitus. Nature 356:162-164.
[0208] Gloyn A L, Hashim Y, Ashcroft S J, Ash-field R, Wiltshire S, Turner R C. 2001. Association studies of variants in promoter and coding regions of beta-cell ATP-sensitive K-channel genes SUR1 and Kir6.2 with Type 2 diabetes mellitus (UKPDS 53). Diabetes Med. 18:206-12.
[0209] Gloyn A L, Weedon M N, Owen K R, Turner M J, Knight B A, et al. 2003. Large-scale association studies of variants in genes encoding the pancreatic {beta}-cell KATP channel subunits Kir6.2 (KCNJ11) and SUR1 (ABCC8) confirm that the KCNJ11 E23K variant is associated with type 2 diabetes. Diabetes 52:568-72.
[0210] Gough S C, Saker P J, Pritchard L E, Merriman T R, Merriman M E, et al. 1995. Mutation of the glucagon receptor gene and diabetes mellitus in the UK: association or founder effect? Hum. Mol. Genet. 4:1609-12.
[0211] Griffiths A D, Malmqvist M, Marks J D, Bye J M, Embleton M J, McCafferty J, Baier M, Holliger K P, Gorick B D, Hughes-Jones N C, et al. 1993. Human anti-self antibodies with high specificity from phage display libraries. EMBO J. 12:725-34.
[0212] Gunton J E, Kulkarni R N, Yim S, Okada T, Hawthorne W J, Tseng Y H, Roberson R S, Ricordi C, O'Connell P J, Gonzalez F J, Kahn C R. 2005. Loss of ARNT/HIF1 beta mediates altered gene expression and pancreatic-islet dysfunction in human type 2 diabetes.
[0213] Cell. 122: 337-49.
[0214] Guthrie R A, Guthrie D W. 2004. Pathophysiology of diabetes mellitus. Crit Care Nurs Q. 27:113-25.
[0215] Hager J, Hansen L, Vaisse C, Vionnet N, Philippi A, et al. 1995. A missense mutation in the glucagon receptor gene is associated with non-insulin-dependent diabetes mellitus. Nat. Genet. 9:299-304.
[0216] Hani E H, Boutin P, Durand E, Inoue H, Permutt M A, et al. 1998. Missense mutations in the pancreatic islet beta cell inwardly rectifying K+ channel gene (KIR6.2/BIR): a meta-analysis suggests a role in the polygenic basis of Type II diabetes mellitus in Caucasians. Diabetologia 41:1511-15.
[0217] Hani E H, Clement K, Velho G, Vionnet N, Hager J, et al. 1997. Genetic studies of the sulfonylurea receptor gene locus in NIDDM and in morbid obesity among French Caucasians. Diabetes 46:688-94.
[0218] Hansen T, Echwald S M, Hansen L, Moller A M, Almind K, et al. 1998. Decreased tolbutamide-stimulated insulin secretion in healthy subjects with sequence variants in the high-affinity sulfonylurea receptor gene. Diabetes 47: 598-605.
[0219] Hara K, Okada T, Tobe K, Yasuda K, Mori Y, et al. 2000. The Pro12Ala poly-morphism in PPAR gamma2 may confer resistance to type 2 diabetes. Biochem. Biophys. Res. Commun. 271:212-16.
[0220] Hay B N, Sorge J A, Shopes B. 1992. Bacteriophage cloning and Escherichia coli expression of a human IgM Fab. Hum Antibodies Hybridomas. 3:81-5.
[0221] Hayashi N, Kipriyanov S, Fuchs P, Welschof M, Dorsam H, Little M. 1995. A single expression system for the display, purification and conjugation of single-chain antibodies. Gene. 160:129-30.
[0222] Hering S, Karawajew L, Pasternak G. 1988. Raji-K562 hybrids and their use for trioma production. Biomed Biochim Acta. 47:211-6.
[0223] Herman W H, Fajans S S, Oritz F J, Smith M J, Sturis J, Bell G I, Polonsky K S, Halter J B. 1994. Abnormal insulin secretion, not insulin resistance, is the genetic or primary defect of MODY in the RW pedigree. Diabetes 43:40-46.
[0224] Huse W D, Sastry L, Iverson S A, Kang A S, Alting-Mees M, Burton D R, Benkovic S J, Lerner R A. 1989. Generation of a large combinatorial library of the immunoglobulin repertoire in phage lambda. Science. 246:1275-81.
[0225] Inoue H, Ferrer J, Welling C M, Elbein S C, Hoffman M, et al. 1996. Sequence variants in the sulfonylurea receptor (SUR) gene are associated with NIDDM in Caucasians. Diabetes 45:825-31.
[0226] Kadowaki T, Kadowaki H, Mori Y, Tobe K, Sakuta R, Suzuki Y, Tanabe Y, Sakura H, Awata T, Goto Y, et al. 1994. A subtype of diabetes mellitus associated with a mutation of mitochondrial DNA. N Engl J Med 330:962-968.
[0227] Kahn C R, Flier J S, Bar R S, Archer J A, Gorden P, Martin M M, Roth J. 1976. The syndromes of insulin resistance and acanthosis nigricans. N Engl J Med 294:739-745.
[0228] Kohler G, Milstein C. 1975. Continuous cultures of fused cells secreting antibody of predefined specificity. Nature 256:495-497.
[0229] Kozbor D, Lagarde A E, Roder J C. 1982. Human hybridomas constructed with antigen-specific Epstein-Barr virus-transformed cell lines. Proc Natl Acad Sci USA. 79:6651-5.
[0230] Kwok P-Y. 2001. Methods for genotyping single nucleotide polymorphisms. Ann Rev Genomics Hum Genet. 2:235-258.
[0231] Laaksonen D E, Lakka T A, Lakka H-M, Nyyssonen K, Rissanen T, Niskanen L K, Salonen J T. 2002. Serum fatty acid composition predicts development of impaired fasting glycaemia and diabetes in middle-aged men. Diabetic Medicine 19:456-64.
[0232] Lakka H-M, Oksanen L, Tuomainen T-P, Kontula K, Salonen J T. 2000. The common pentanucleotide polymorphism of the 3′-untranslated region of the leptin receptor gene is associated with serum insulin levels and the risk of type 2 diabetes in non-diabetic men: a prospective case-control study. J Int Med 248: 77-83.
[0233] Lehtovirta M, Kaprio J, Grrop L, trombetta M, Bonadonna R C. 2005. Heritability of model-derived parameters of beta cell secretion during intravenous and oral glucose tolerance tests: a study of twins. Diabetologia 48: 1604-13.
[0234] Li S R, Baroni M G, Oelbaum R S, Stock J, Galton D J. 1988. Association of genetic variant of the glucose transporter with non-insulin-dependent diabetes mellitus. Lancet 2:368-70.
[0235] Lowe W L Jr. Genetics of diabetes mellitus. Kluwer Academic Publishers, 2001.
[0236] Luan J, Browne P O, Harding A H, Halsall D J, O'Rahilly S, Chatterjee V K, Wareham N J. 2001. Evidence for gene-nutrient interaction at the PPARgamma locus. Diabetes. 50:686-9.
[0237] Martin B C, Warram J H, Krolewski A S, Bergman R N, Soeldner J S, Kahn C R. 1992. Role of glucose and insulin resistance in development of type 2 diabetes mellitus: results of a 25-year follow-up study. Lancet 340:925-9.
[0238] McCarthy M I, Hitman G A, Hitchins M, Riikonen A, Stengard J, et al. 1994. Glu-cokinase gene polymorphisms: a genetic marker for glucose intolerance in a cohort of elderly Finnish men. Diabetes Med. 11:198-204.
[0239] Memisoglu A, Hu F B, Hankinson S E, Manson J E, De Vivo I, Willett W C, Hunter D J. 2003. Interaction between a peroxisome proliferator-activated receptor gamma gene polymorphism and dietary fat intake in relation to body mass. Hum Mol Genet. 12:2923-9.
[0240] Mori H, Ikegami H, Kawaguchi Y, Seino S, Yokoi N, et al. 2001. The Pro12−Ala substitution in PPAR-gamma is associated with resistance to development of diabetes in the general population: possible involvement in impairment of insulin secretion in individuals with type 2 diabetes. Diabetes 50:891-94.
[0241] Motoshima H, Wu X, Sinha M K, Hardy V E, Rosato E L, Barbot D J, Rosato F E, Goldstein B J. 2002. Differential regulation of adiponectin secretion from cultured human omental and subcutaneous adipocytes: effects of insulin and rosiglitazone. J Clin Endocrinol Metab. 87:5662-7.
[0242] Nielsen P E, Egholm M, Berg R H, Buchardt O. 1991. Sequence-selective recognition of DNA by strand displacement with a thymine-substituted polyamide. Science. 254:1497-500.
[0243] Peltonen L, Jalanko A, Varilo T. Molecular genetics of the Finnish disease heritage. 1999. Hum Mol Genet. 8: 1913-23.
[0244] Pontiroli A E, Capra F, Veglia F, Ferrari M, Xiang K S, et al. 1996. Genetic contribution of polymorphism of the GLUT1 and GLUT4 genes to the susceptibility to type 2 (non-insulin-dependent) diabetes mellitus in different populations. Acta Diabetologica 33:193-97.
[0245] Poulsen P, Kyvik K O, Vaag A, Beck-Nielsen H. 1999. Heritability of type II (non-insulin-dependent) diabetes mellitus and abnormal glucose tolerance—a population-based twin study. Diabetologia 42:139-45.
[0246] Prentki M, Joly E, El-Assaad W, Roduit R. 2002. Malonyl-CoA signaling, lipid partitioning, and glucolipotoxicity: role in beta-cell adaptation and failure in the etiology of diabetes. Diabetes. 51 Suppl 3:S405-13.
[0247] Ravussin E, Smith S R. 2002. Increased fat intake, impaired fat oxidation, and failure of fat cell proliferation result in ectopic fat storage, insulin resistance, and type 2 diabetes mellitus. Ann N Y Acad Sci. 967:363-78.
[0248] Reardon W, Ross R J M, Sweeney M G, Luxon L M, Pembrey M E, Harding A E, Trembath R C. 1992. Diabetes mellitus associated with a pathogenic point mutation in mitochondrial DNA. Lancet 340:1376-1379.
[0249] Sajantila A, Salem A H, Savolainen P, Bauer K, Gierig C, Paabo S. 1996. Paternal and maternal DNA lineages reveal a bottleneck in the founding of the Finnish population. Proc Natl Acad Sci USA. 93: 12035-9.
[0250] Salonen J T, Lakka T A, Lakka H-M, Valkonen V-P, Everson S A, Kaplan G A. 1998. Hyperinsulinemia is associated with the Incidence of hypertension and dyslipidemia in middle-aged men. Diabetes 47:270-275.
[0251] Salonen J T, Malin R, Tuomainen T P, Nyyssonen K, Lakka T A, Lehtimaki T. 1999. Polymorphism in high density lipoprotein paraoxonase gene and risk of acute myocardial infarction in men: prospective nested case-control study. BMJ. 319:487-9.
[0252] Salonen J T, Tuomainen T-P, Kontula K. 2000. Role of C282Y mutation in haemochromatosis gene in development of type 2 diabetes in healthy men: prospective cohort study. Brit Med J 320: 1706-1707.
[0253] Salonen J T. 1988. Is there a continuing need for longitudinal epidemiologic research? The Kuopio Ischaemic Heart Disease Risk Factor Study. Ann Clin Res 20: 46-50.
[0254] Salonen, J T. 2003. The value of founder populations in genetic analysis. Current Drug Discovery pp. 27, 30-31.
[0255] Saltiel A R, Kahn C R. 2001. Insulin signalling and the regulation of glucose and lipid metabolism. Nature. 414:799-806.
[0256] Scheen A J. 2003. Pathophysiology of type 2 diabetes. Acta Clin Belg. 58:335-41.
[0257] Scheen A J. 2004. Pathophysiology of insulin secretion. Ann Endocrinol (Paris). 65:29-36.
[0258] Shulman G I. 2000. Cellular mechanisms of insulin resistance. J Clin Invest. 106:171-6.
[0259] Syvaqnen A-C. 2001. Accessing genetic variation: Genotyping single nucleotide polymorphisms. Nature Reviews Genetics. 2:930-942.
[0260] Takekawa K, Ikegami H, Fukuda M, Ueda H, Kawaguchi Y, et al. 1994. Early-onset type 2 (non-insulin-dependent) diabetes mellitus is associated with glucokinase locus, but not with adenosine deaminase locus, in the Japanese population. Diabetes Res. Clin. Pract. 23:141-46.
[0261] Tao T, Tanizawa Y, Matsutani A, Matsubara A, Kaneko T, Kaku K. 1995. HepG2/erythrocyte glucose transporter (GLUT1) gene in NIDDM: a population association study and molecular scanning in Japanese subjects. Diabetologia 38:942-47.
[0262] Taylor S I. 1992. Lilly Lecture: molecular mechanisms of insulin resistance: lessons from patients with mutations in the insulin-receptor gene. Diabetes 41:1473-1490.
[0263] Toivonen H T, Onkamo P, Vasko K, Ollikainen V, Sevon P, Mannila H, Herr M, Kere J. 2000. Data mining applied to linkage disequilibrium mapping. Am J Hum Genet. 67:133-45.
[0264] Tomas E, Tsao T S, Saha A K, Murrey H E, Zhang Cc C, Itani S I, Lodish H F, Ruderman N B. 2002. Enhanced muscle fat oxidation and glucose transport by ACRP30 globular domain: acetyl-CoA carboxylase inhibition and AMP-activated protein kinase activation. Proc Natl Acad Sci USA. 99:16309-13.
[0265] Tuomainen T P, Kontula K, Nyyssonen K, Lakka T A, Helio T, Salonen J T. 1999. Increased risk of acute myocardial infarction in carriers of the hemochromatosis gene Cys282Tyr mutation : a prospective cohort study in men in eastern Finland. Circulation. 100:1274-9.
[0266] Uimari P, Kontkanen O, Visscher P M, Pirskanen M, Fuentes R, Salonen J T. 2005. Genome-wide linkage disequilibrium from 100,000 SNPs in the East Finland founder population. Twin Res Hum Genet. 8:185-97.
[0267] van den Ouwenland J M W, Lemkes H H P J, Ruitenbeek W, Sandkuijl L A, de Vijlder M F, Struyvenberg P A A, van de Kamp, Maassen J A. 1992. Mutation in mitochondrial tRNA (Leu(URR) gene in a large pedigree with maternally transmitted type II diabetes mellitus and deafness. Nature Genet 1:368-371.
[0268] Vaxillaire M, Boccio V, Philippi A, Vigouroux C, Terwilliger J, Passa P, Beckman J S, Velho G, Lathrop G M, Froguel P. 1995. A gene for maturity onset diabetes of the young (MODY) maps to chromosome 12q. Nature Genet 9:418-423.
[0269] Vionnet N, Stoffel M, Takeda J, Yasuda K, Bell G I, Zouali H, Lesage S, Velho G, Iris F, Passa P, et al. 1992. Nonsense mutation in the glucokinase gene causes early-onset non-insulin-dependent diabetes mellitus. Nature 356:721-722.
[0270] World Health Organization and the International Diabetes Federation. 2004. Diabetes Action Now booklet. http://www.who.int/diabetes/actionnow/booklet/en (Accessed 02.07.04)
[0271] World Health Organization. 2004. Diabetes Mellitus fact sheet. http://www.who.int/mediacentre/factsheets/fs138/en (Accessed 02.07.04).
[0272] Wu X, Hoffstedt J, Deeb W, Singh R, Sedkova N, Zilbering A, Zhu L, Park P K, Arner P, Goldstein B J. 2001. Depot-specific variation in protein-tyrosine phosphatase activities in human omental and subcutaneous adipose tissue: a potential contribution to differential insulin sensitivity. J Clin Endocrinol Metab. 86:5973-80.
[0273] Yamagata K, Furuta H, Oda N, Kaisaki P J, Menzel S, Cox N J, Fajans S S, Signorini S, Stoffel M, Bell G I. 1996. Mutations in the hepatocyte factor-4α gene in maturity-onset diabetes of the young (MODY 1). Nature 384:458-460.
[0274] Yamagata K, Oda N, Kaisaki P J, Menzel S, Furuta H, Vaxillaire M, Southarm L, Cox R D, Lathrop G M, Boriraj V V, Chen X, Cox N J, Oda Y, Yano H, Le Beau M M, Yamada S, Nishigori H, Takeda J, Fajans S S, Hattersley A T, Iwasaki N, Hansen T, Pedersen O, Polonsky K S, Bell G I. 1996. Mutations in the hepatocyte nuclear factor-1α gene in maturity-onset diabetes of the young (MODY 3). Nature 384:455-458.
[0275] Yamauchi T, Kamon J, Minokoshi Y, Ito Y, Waki H, Uchida S, Yamashita S, Noda M, Kita S, Ueki K, Eto K, Akanuma Y, Froguel P, Foufelle F, Ferre P, Carling D, Kimura S, Nagai R, Kahn B B, Kadowaki T. 2002. Adiponectin stimulates glucose utilization and fatty-acid oxidation by activating AMP-activated protein kinase. Nat Med. 8:1288-95.
[0276] Zick Y. 2001. Insulin resistance: a phosphorylation-based uncoupling of insulin signaling. Trends Cell Biol. 11:437-41.

1. A method for risk assessment, diagnosis or prognosis of T2D or a T2D related condition in a mammalian subject comprising:
a) providing a biological sample taken from the subject;
b) assessing one or several biomarkers in said sample, wherein said biomarkers are associated with the T2D associated genes set forth in table 13, or with the proteins or polypeptides encoded by said genes, and;
c) comparing biomarker data obtained in step b) to biomarker data from healthy and diseased people to make risk assessment, diagnosis or prognosis of T2D or a T2D related condition.

2. The method according to claim 1, wherein said biomarkers are polymorphic sites residing in genomic regions containing the T2D associated genes set forth in table 13.

3. The method according to claim 1, wherein said biomarkers are selected from SNP markers set forth in tables 1 to 12.

4. The method according to claim 1, wherein said biomarkers are polymorphic sites associated with one or several of the SNP markers set forth in tables 1 to 12.

5. The method according to claim 1, wherein said biomarkers are polymorphic sites being in complete linkage disequilibrium with one or several of the SNP markers set forth in tables 1 to 12.

6. The method according to claim 1, wherein said biomarkers are expression products of one or several of the said T2D associated genes.

7. The method according to claim 6, wherein said biomarkers are transcription products of one or several of the said T2D associated genes.

8. The method according to claim 6, wherein said biomarkers are translation products of one or several of the said T2D associated genes.

9. The method according to claim 1, wherein said biomarkers are measuring biological activities of the polypeptides encoded by one or several of the said T2D associated genes.

10. The method according to claim 1, wherein said biomarkers are measuring biological functions of the polypeptides encoded by one or several of the said T2D associated genes.

11. The method according to claim 1, wherein said biomarkers are metabolites of the polypeptides encoded by one or several of the said T2D associated genes.

12. The method according to claim 1, wherein said biomarkers are associated to endogenous or exogenous modulators of said T2D associated genes, proteins or polypeptides.

13. The method according to claim 1, wherein said biomarkers are a set of antibodies specific to the polypeptides encoded by one or several of the said T2D associated genes.

14. The method according to claim 1, wherein said biomarkers are any combination of biomarkers of the claims 2 to 13.

15. The method according to claim 1, wherein said method is for identifying subjects having altered risk for developing T2D or a T2D related condition.

16. The method according to claim 1, wherein said method is for diagnosing a subtype of T2D in a subject having T2D or a T2D related condition.

17. The method according to claim 1, wherein said method is for selecting efficient and safe T2D therapy to a subject having T2D or a T2D related condition.

18. The method according to claim 1, wherein said method is for monitoring the effect of a therapy administered to a subject having T2D or a T2D related condition.

19. The method according to claim 1, wherein said method is for predicting the effectiveness of a given therapeutic to treat T2D in a subject having T2D or a T2D related condition.

20. The method according to claim 1, wherein said method is for selecting efficient and safe T2D preventative therapy to a subject having increased risk of T2D or a T2D related condition.

21. The method according to claim 1, wherein said method is for monitoring the effect of preventive therapy administered to a subject having increased risk of T2D or a T2D related condition.

22. The method according to claim 1, wherein said method is for predicting the effectiveness of a given therapeutic to prevent T2D in a subject having increased risk of T2D or a T2D related condition.

23. The method according to claim 1 further comprising a marker set to assess the ancestry of a subject.

24. The method according to claim 23, wherein a SNP marker set is used to assess the ancestry of a subject.

25. The method according to claim 23, wherein a microsatellite marker set is used to assess the ancestry of an individual.

26. The method according to claim 1 further comprising a step of combining non-genetic information with the biomarker data to make risk assessment, diagnosis or prognosis of T2D or a T2D related condition.

27. The method according to claim 26, wherein the non-genetic information concerns age, gender, ethnicity, socioeconomic status, history of gestational diabetes, other medical history of the subject, family history of relevant conditions, psychological traits and states, behaviour patterns and habits, biochemical measurements, clinical measurements, and measurements of obesity and adiposity.

28. The method according to claim 27, wherein the other medical history of the subject concerns the metabolic syndrome, glucose intolerance, increased insulin resistance, obesity, nephropathies, hypothyroidism, hyperthyroidism, disorders of the pituitary gland, disorders of the hypothalamus, disorders of the pancreas, appetite and eating disorders and conditions which limit physical activity, low weight at birth and/or premature birth.

29. The method according to claim 27, wherein the relevant family history information concerns type I and type 2 diabetes, gestational diabetes, other type of diabetes, the metabolic syndrome, glucose intolerance, increased insulin resistance, obesity, hypothyroidism, hyperthyroidism, disorders of the pituitary grand, disorders of the hypothalamus, disorders of the pancreas and appetite and eating disorders.

30. The method according to claim 27, wherein the biochemical measurements include measurements of lipids, lipoproteins, carbohydrates and peptides and proteins in human tissues and body fluids.

31. The method according to claim 30, wherein the protein measurements include the measurements of prohormones, hormones, enzymes and receptors.

32. The method according to claims 30 and 31, wherein the measurements include the measurements of glycated peptides and proteins, advanced glycated end products, oxidatively modified proteins and peptides, glucagons, glucagons-like peptides (GLP), other insulinotropic peptides, proinsulins, insulin, insulin degrading enzymes, growth hormone, thyrotropin-releasing hormone (TRH), TRH-like peptides, prolactine, amylins, homocysteine, C-peptide, leptins, adiponectins, ghrelins, gastrins, resistin, obestatin, incretins, markers of mild chronic inflammation, such as TNFα, IL-6 and C-reactive protein, dipeptidyl peptidase IV, endothelins, pituitary adenylate cyclase activating peptides (PACAPs), vasoactive intestinal peptides (VIPs), hypothalamic regulatory peptides, opioid peptides, neuropeptide Y, adrenomedullin, atrial and brain natriuretic peptides (ANPs, BNPs), heat shock protein derived peptides, ferritin, transferrin, ceruloplasmin, albumin, the endogenous activators, inhibitors, inactivators, receptors and degradators of the said peptides and enzymes involved in the synthesis and release of the said peptides.

33. The method according to claim 27, wherein the measurements of obesity and adiposity include height, weight, body-mass index (kg/m2), waist circumference, waist-to-hip circumference ratio, skinfold thickness measurements, adipose tissue thickness measurements and measurements of amount and proportion of adipose tissue of the body.

34. The method according to claim 27, wherein the behaviour patterns and habits include tobacco smoking, physical activity, dietary intakes of nutrients, salt intake, alcohol intake and consumption patterns and coffee consumption and quality.

35. The method according to claim 1 further comprising a step of calculating the risk of T2D using a logistic regression equation as follows:
Risk of T2D=[1+e^{-(a+Σ(bi*Xi)}]⁻¹, where e is Napier's constant, Xᵢ; are variables associated with the risk of T2D, bᵢ; are coefficients of these variables in the logistic function, and a is the constant term in the logistic function.

36. The method according to claim 35, wherein a and bi; are determined in the population in which the method is to be used.

37. The method according to claim 35, wherein Xi are selected among the variables that have been measured in the population in which the method is to be used.

38. The method according to claim 35, wherein Xi are selected among the SNP markers of tables 1 to 12, among haplotypes of tables 2, 3, 4, 5, 6, 7, 9 and 10 and among nongenetic variables of the invention.

39. The method according to claim 35, wherein bᵢ; are between the values of −20 and 20 and/or wherein Xᵢ; can have values between −99999 and 99999 or are coded as 0 (zero) or 1 (one).

40. The method according to claim 35, wherein i are between the values 0 (none) and 100,000.

41. The method according to claim 35, wherein subject's short term, median term, and/or long term risk of T2D is predicted.

42. A test kit based on a method of claim 1 for risk assessment, diagnosis or prognosis of T2D or a T2D related condition comprising:
a) reagents, materials and protocols for assessing type and/or level of one or more biomarkers in a biological sample, wherein said biomarkers are associated to the T2D associated genes set forth in table 13, or to the proteins or polypeptides encoded by said genes, and;
b) instructions and software for comparing the biomarker data from a subject to biomarker data from healthy and diseased people to make risk assessment, diagnosis or prognosis of T2D or a T2D related condition.

43. The kit of claim 42 comprising a PCR primer set for amplifying nucleic acid fragments containing one or several polymorphic sites residing in genomic regions containing the T2D associated genes set forth in table 13.

44. The kit of claim 42 comprising a capturing nucleic acid probe set specifically binding to one or several polymorphic sites residing in genomic regions containing the T2D associated genes set forth in table 13.

45. The test kit of claim 42 comprising a microarray or multiwell plate to assess the genotypes.

46. The test kit according to claim 42 further comprising a questionnaire and instructions for collecting personal and clinical information from the subject, and software and instructions for combining personal and clinical information with biomarker data to make risk assessment, diagnosis or prognosis of T2D or a T2D related condition.

47. The test kit according to claim 46, wherein the non-genetic information concerns age, gender, ethnicity, socioeconomic status, history of gestational diabetes, other medical history of the subject, family history of relevant conditions, psychological traits and states, behaviour patterns and habits, biochemical measurements, clinical measurements, and measurements of obesity and adiposity.

48. The test kit according to claim 47, wherein the other medical history of the subject concerns the metabolic syndrome, glucose intolerance, increased insulin resistance, obesity, nephropathies, hypothyroidism, hyperthyroidism, disorders of the pituitary gland, disorders of the hypothalamus, disorders of the pancreas, appetite and eating disorders and conditions which limit physical activity, low weight at birth and/or premature birth.

49. The test kit according to claim 47, wherein the relevant family history information concerns type 1 and type 2 diabetes, gestational diabetes, other type of diabetes, the metabolic syndrome, glucose intolerance, increased insulin resistance, obesity, hypothyroidism, hyperthyroidism, disorders of the pituitary grand, disorders of the hypothalamus, disorders of the pancreas and appetite and eating disorders.

50. The test kit according to claim 47, wherein the biochemical measurements include measurements of lipids, lipoproteins, carbohydrates and peptides and proteins in human tissues and body fluids.

51. The test kit according to claim 50, wherein the protein measurements include the measurements of prohormones, hormones, enzymes and receptors.

52. The test kit according to claims 50 and 51, wherein the measurements include the measurements of glycated peptides and proteins, advanced glycated end products, oxidatively modified proteins and peptides, glucagons, glucagons-like peptides (GLP), other insulinotropic peptides, proinsulins, insulin, insulin degrading enzymes, growth hormone, thyrotropin-releasing hormone (TRH), TRH-like peptides, prolactine, amylins, homocysteine, C-peptide, leptins, adiponectins, ghrelins, gastrins, resistin, obestatin, incretins, markers of mild chronic inflammation, such as TNFα, IL-6 and C-reactive protein, dipeptidyl peptidase IV, endothelins, pituitary adenylate cyclase activating peptides (PACAPs), vasoactive intestinal peptides (VIPs), hypothalamic regulatory peptides, opioid peptides, neuropeptide Y, adrenomedullin, atrial and brain natriuretic peptides (ANPs, BNPs), heat shock protein derived peptides, ferritin, transferrin, ceruloplasmin, albumin, the endogenous activators, inhibitors, inactivators, receptors and degradators of the said peptides and enzymes involved in the synthesis and release of the said peptides.

53. The test kit according to claim 47, wherein the measurements of obesity and adiposity include height, weight, body-mass index (kg/m2), waist circumference, waistto-hip circumference ratio, skinfold thickness measurements, adipose tissue thickness measurements and measurements of amount and proportion of adipose tissue of the body.

54. The test kit according to claim 47, wherein the behaviour patterns and habits include tobacco smoking, physical activity, dietary intakes of nutrients, salt intake, alcohol intake and consumption patterns and coffee consumption and quality.

55. The test kit according to claim 42, wherein said biomarkers are polymorphic sites residing in genomic regions containing the T2D associated genes set forth in table 13.

56. The test kit according to claim 42, wherein said biomarkers are selected from SNP markers set forth in tables 1 to 12.

57. The test kit according to claim 42, wherein said biomarkers are polymorphic sites associated with one or several of the SNP markers set forth in tables 1 to 12.

58. The test kit according to claim 42, wherein said biomarkers are polymorphic sites being in complete linkage disequilibrium with one or several of the SNP markers set forth in tables 1 to 12.

59. The test kit according to claim 42, wherein said biomarkers are expression products of one or several of the said T2D associated genes.

60. The test kit according to claim 59, wherein said biomarkers are transcription products of one or several of the said T2D associated genes.

61. The test kit according to claim 59, wherein said biomarkers are translation products of one or several of the said T2D associated genes.

62. The test kit according to claim 42, wherein said biomarkers are measuring biological activities of the polypeptides encoded by one or several of the said T2D associated genes.

63. The test kit according to claim 42, wherein said biomarkers are measuring biological functions of the polypeptides encoded by one or several of the said T2D associated genes.

64. The test kit according to claim 42, wherein said biomarkers are metabolites of the polypeptides encoded by one or several of the said T2D associated genes.

65. The test kit according to claim 42, wherein said biomarkers are associated to endogenous or exogenous modulators of said T2D associated genes, proteins or polypeptides.

66. The test kit according to claim 42, wherein said biomarkers are a set of antibodies specific to the polypeptides encoded by one or several of the said T2D associated genes.

67. The test kit according to claim 42, wherein said biomarkers are any combination of biomarkers tised in the test ]iits of the claims 55 to 66.

68. The test kit according to claim 42, wherein said kit is for identifying subjects having altered risk for developing T2D or a T2D related condition.

69. The test kit according to claim 42, wherein said kit is for diagnosing a subtype of T2D in a subject having T2D or a T2D related condition.

70. The test kit according to claim 42, wherein said kit is for selecting efficient and safe T2D therapy to a subject having T2D or a T2D related condition.

71. The test kit according to claim 42, wherein said kit is for monitoring the effect of a therapy administered to a subject having T2D or a T2D related condition.

72. The test kit according to claim 42, wherein said kit is for predicting the effectiveness of a given therapeutic to treat T2D in a subject having T2D or a T2D related condition.

73. The test kit according to claim 42, wherein said kit is for selecting efficient and safe T2D preventative therapy to a subject having increased risk of T2D or a T2D related condition.

74. The test kit according to claim 42, wherein said kit is for monitoring the effect of preventive therapy administered to a subject having increased risk of T2D or a T2D related condition.

75. The test kit according to claim 42, wherein said kit is for predicting the effectiveness of a given therapeutic to prevent T2D in a subject having increased risk of T2D or a T2D related condition.

76. The test kit of claim 42 further comprising a marker set to assess the ancestry of a subject.

77. The test kit according to claim 76, wherein a SNP marker set is used to assess the ancestry of a subject.

78. The test kit according to claim 76, wherein a microsatellite marker set is used to assess the ancestry of an individual.

79. A method for preventing or treating T2D or a T2D related condition in a mammalian subject comprising a therapy modulating biological activity or function of a protein or a polypeptide encoded by a T2D associated gene set forth in table 13.

80. The method according to claim 79 comprising administering to a mammalian subject in need of such treatment an effective amount of a therapeutic agent enhancing or reducing expression of one or several T2D associated genes set forth in table 13.

81. The method according to claim 79 comprising administering to a mammalian subject in need of such treatment an effective amount of a therapeutic agent enhancing or reducing biological activity or function of a protein or a polypeptide encoded by a T2D associated gene set forth in table 13.

82. The method according to claim 79 comprising administering to a mammalian subject in need of such treatment an effective amount of a therapeutic agent enhancing or reducing expression of one or several genes in biological networks and/or metabolic pathways related to a protein or to a polypeptide encoded by a T2D associated gene set forth in table 13.

83. The method according to claim 79 comprising administering to a mammalian subject in need of such treatment an effective amount of a therapeutic agent enhancing or reducing activity of one or several biological networks and/or metabolic pathways related to a protein or to a polypeptide encoded by a T2D associated gene set forth in table 13.

84. The method according to claim 79 comprising administering to a mammalian subject in need of such treatment an effective amount of a therapeutic agent enhancing or reducing activity of one or several pathophysiological pathways involved in T2D or a related condition and related to polypeptides encoded by a T2D associated gene set forth in table 13.

85. The method according to claim 79 comprising a therapy restoring, at least partially, the observed alterations in biological activity of one or several proteins or polypeptides encoded by a T2D associated gene set forth in table 13 in said subject, when compared with T2D free healthy subjects.

86. The method according to claim 79 comprising a therapy restoring, at least partially, the observed alterations in expression of one or several T2D associated genes set forth in table 13 in said subject, when compared with T2D free healthy subjects.

87. The method according to claim 79 comprising gene therapy or gene transfer.

88. The method according to claim 87, wherein said therapy comprises the transfer of one or several T2D associated genes set forth in table 13 or variants, fragments or derivatives thereof.

89. The method according to claim 88, wherein said T2D associates genes set forth in table 13 or variants, fragments or derivatives thereof are associated with reduced risk of T2D or a T2D related condition.

90. The method according to claim 87, wherein said therapy comprises treating regulatory regions and/or gene containing region of one or several T2D risk genes set forth in table 13 or variants, fragments or derivatives thereof in somatic cells, in stem cells, or in affected tissues of said subject.

91. The method according to claim 79, wherein said therapy comprises a recombinant polypeptide encoded by a T2D risk gene set forth in table 13 or variant, fragment or derivative thereof.

92. The method according to claim 79, wherein said therapy comprises an antibody binding to a proteins or to a polypeptide encoded by a T2D risk gene set forth in table 13.

93. The method according to claim 79, wherein said therapy comprises an agent binding to a protein or to a polypeptide encoded by a T2D associated gene set forth in table 13.

94. The method according to claim 79, wherein said therapy is based on sequence specific gene silencing agents such as siRNA hybridising to mRNA and/or to hnRNA of a T2D associated gene set forth in table 13.

95. The method according to claim 79, wherein said therapy is based on sequence specific gene silencing agents such as siRNA hybridising to mRNA and/or to hnRNA of one or several genes in biological networks and/or metabolic pathways related to proteins and polypeptides encoded by said T2D associated genes set forth in table 13.

96. The method according to claim 79, wherein said therapy is a dietary treatment or a vaccination.

97. A method for screening agents useful in prevention or treatment of T2D or a T2D related condition comprising determining the effect of agents either on biological networks related to one or several polypeptides encoded by one or-several T2D associated genes set forth in table 13 or on metabolic pathways related to one or several polypeptides encoded by said T2D associated genes in living cells; wherein an agent altering activity of one or several said biological networks and/or metabolic pathways is considered useful in prevention or treatment of T2D or a T2D related condition.

98. The method according to claim 97, wherein the candidate agents are administered to a model system or organism, wherein agents altering or modulating transcriptional expression, translation, biological activity, biological structure, and/or amount of metabolites of one or several of the said T2D associated genes or polypeptides are considered useful in prevention or treatment of T2D or a T2D related condition.

99. The method according to claim 98, wherein the model system or organism is a non-human transgenic animal expressing one or several of the T2D associated genes set forth in table 13.

100. The method according to claim 98 comprising cultured microbial, insect or mammalian cells expressing one or several of the T2D associated genes set forth in table 13.

101. The methods according to claim 98 comprising mammalian tissues, organs or organ systems expressing one or several of the T2D associated genes set forth in table 13.

102. A method of using non-human transgenic animals expressing one or several of the T2D associated genes set forth in table 13 to study pathophysiology and/or molecular mechanisms involved in T2D or a T2D related condition.

103. A pharmaceutical composition useful in prevention or treatment of T2D or a T2D related condition comprising an agent altering biological activity or function of one or several polypeptides encoded by one or several T2D associated genes set forth in table 13.

104. The pharmaceutical composition according to claim 103 comprising an agent altering expression of one or several T2D associated genes set forth in table 13.

105. The pharmaceutical composition according to claim 103 comprising an agent altering expression of one or several genes in biological networks and/or metabolic pathways related to polypeptides encoded by a T2D associated gene set forth in table 13.

106. The pharmaceutical composition according to claim 103 comprising an agent altering activity of one or several biological networks and/or metabolic pathways related to polypeptides encoded by a T2D associated gene set forth in table 13.

107. The pharmaceutical composition according to claim 103 comprising an agent altering activity of one or several pathophysiological pathways involved in T2D or in a T2D related condition, and related to polypeptides encoded by a T2D associated gene set forth in table 13.

108. The pharmaceutical composition according to claim 103 comprising an agent restoring, at least partially, the observed alterations in biological activity of one or several polypeptides encoded by a T2D associated gene set forth in table 13 in said subject, when compared with T2D free healthy subjects.

109. The pharmaceutical composition according to claim 103 comprising an agent restoring, at least partially, the observed alterations in expression of one or several T2D associated genes set forth in table 13 in said subject, when compared with T2D free healthy subjects.

110. The pharmaceutical composition according to claim 103 comprising a polynucleotide hybridising either to a mRNA or to a regulatory region of a T2D associated gene set forth in table 13.

111. The pharmaceutical composition according to claim 103 comprising a recombinant polypeptide encoded by a T2D risk gene set forth in table 13 or variant, fragment or derivative thereof.

112. The pharmaceutical composition according to claim 103 comprising an antibody binding to one or several polypeptides encoded by a T2D risk gene set forth in table 13.

113. The pharmaceutical composition according to claim 103 comprising an agent binding to one or several polypeptides encoded by a T2D associated gene set forth in table 13.

114. The pharmaceutical position according to claim 103 comprising sequence specific gene silencing agents such as siRNA hybridising to mRNA and/or to hnRNA of a T2D associated gene set forth in table 13.

115. The pharmaceutical composition according to claim 103 comprising sequence specific gene silencing agents such as siRNA hybridising to mRNA and/or to hnRNA of one or several genes in biological networks and/or metabolic pathways related a protein or to a polypeptide encoded by a T2D associated gene set forth in table 13.

The application's sequence listing, which the Patent Office published only in electronic form, follows.

SEQUENCE LISTING (4685 sequences)

SEQ ID NO: 1 - DNA, 51 bp, Homo sapiens
gcaaggtgatccatgcttgcaaccasgacaaaacaagcatgcagtaggcac

SEQ ID NO: 2 - DNA, 51 bp, Homo sapiens
gtgaaagccgctcaccactggcttargaaactcccgggaggcagttgcaaa

SEQ ID NO: 3 - DNA, 51 bp, Homo sapiens
cacttgctatgtgctttgcagatggracttgacttttttttttttgagaca

SEQ ID NO: 4 - DNA, 51 bp, Homo sapiens
ccctatgctggcaggatcaagccaargctaagctctttaactttcaacact

SEQ ID NO: 5 - DNA, 51 bp, Homo sapiens
gggtaaggcagcagtaataggtctgraaagattaacagaggctgactctaa

SEQ ID NO: 6 - DNA, 51 bp, Homo sapiens
gcaaatgttatctgttagctaaaagkcctgctgagcatggacctcaccagg

SEQ ID NO: 7 - DNA, 51 bp, Homo sapiens
gttgaacttgctcatcctttgctaayatgtctttttgcaaagatgacacca

SEQ ID NO: 8 - DNA, 51 bp, Homo sapiens
ctccctctgaagctgtggctcagacrggttaagtcacataatcatacagcc

SEQ ID NO: 9 - DNA, 51 bp, Homo sapiens
tccactcccttctttacttggcaaamtcctatgcatccttcaagacccagt

SEQ ID NO: 10 - DNA, 51 bp, Homo sapiens
aggggtcatagcaggattagatttgyacttcagagccgtctttctggttgc

SEQ ID NO: 11 - DNA, 51 bp, Homo sapiens
cagacaggcagggtccccaaggccaygttgctaggagatgcggccctaggg

SEQ ID NO: 12 - DNA, 51 bp, Homo sapiens
gtgtgtgatagagatttggactacaygtaatgagatttgctgtaatagtat

SEQ ID NO: 13 - DNA, 51 bp, Homo sapiens
gaaaacaggaaagcaatatggaaacyctaatgtaagtgattctttacatat

SEQ ID NO: 14 - DNA, 51 bp, Homo sapiens
atccatatttggtccattaagtttamctgaaagcctctaccagagtgattt

SEQ ID NO: 15 - DNA, 51 bp, Homo sapiens
tccaatgaatgactttcttggcaaayagtgacacacagaatgttcattaag

SEQ ID NO: 16 - DNA, 51 bp, Homo sapiens
tgttttcagtaaaactatactcctamatcttttgcaacggaaacactttta

SEQ ID NO: 17 - DNA, 51 bp, Homo sapiens
aattaaatctatacctgcaatatcayagaatacaatataggaagcaagctg

SEQ ID NO: 18 - DNA, 51 bp, Homo sapiens
gacacgcccagctgctatccacttcyaatcttaccaattccagaaaagatg

SEQ ID NO: 19 - DNA, 51 bp, Homo sapiens
ttttctagatttatggctctgattayctacagttctgtctttcccagtaga

SEQ ID NO: 20 - DNA, 51 bp, Homo sapiens
tgttatcaacgttctccatttcattmaaaaacttcagtgctaggtcctctt

SEQ ID NO: 21 - DNA, 51 bp, Homo sapiens
caaaggctggtgggacttaacattcragtgaagaggacctagcactgaagt

SEQ ID NO: 22 - DNA, 51 bp, Homo sapiens
accttataaaagaaatttagtgaaartaagtctctttgaagtaatgtttaa

SEQ ID NO: 23 - DNA, 51 bp, Homo sapiens
tgaaagaataaaggtaagaagccccractggataacatatgctttctgctc

SEQ ID NO: 24 - DNA, 51 bp, Homo sapiens
tgaccagtttcaaagttgggaatcamggaggcatggatcacactacccctg

SEQ ID NO: 25 - DNA, 51 bp, Homo sapiens
gaaaaagataatgtacgaaatcatayattttgagctttcctcaagtcaaga

SEQ ID NO: 26 - DNA, 51 bp, Homo sapiens
catgaaagtttacaaataaaacaacsactcacaatcagcctaacacttctt

SEQ ID NO: 27 - DNA, 51 bp, Homo sapiens
actggagaaaactgtccaaaccaacmattttagtcttctgggaatggacag

SEQ ID NO: 28 - DNA, 51 bp, Homo sapiens
tttggtatcatggaataaggaatccrgtaacttgaaggcagatagaaatta

SEQ ID NO: 29 - DNA, 51 bp, Homo sapiens
tacaaacattatggtatgtccactcyacaggaaatacatttctggggagtg

SEQ ID NO: 30 - DNA, 51 bp, Homo sapiens
ttatctcttccttctcttaaagcaarttagtcttcctctatcccaataaac

SEQ ID NO: 31 - DNA, 51 bp, Homo sapiens
ttgtttattctctaccttattctacraaggattaaggctgaatatgaaaat

SEQ ID NO: 32 - DNA, 51 bp, Homo sapiens
caaagaatggtgtgcggcataacctmaagctgtggattggggaacagaaca

SEQ ID NO: 33 - DNA, 51 bp, Homo sapiens
aaatgcaagcagtttagaatagaagwctaatcagaagatagagaagctttt

SEQ ID NO: 34 - DNA, 51 bp, Homo sapiens
cgacctgtaatccaatgctatcttgyatggacaataaaaaacacgccagca

SEQ ID NO: 35 - DNA, 51 bp, Homo sapiens
gtacatggtgactctcattgttgatragtataaggaccaagacttggtcac

SEQ ID NO: 36 - DNA, 51 bp, Homo sapiens
aaaataagggaaatacccgtaaagaycataatgagatataatttacatcca

SEQ ID NO: 37 - DNA, 51 bp, Homo sapiens
ctacaaatacaaagactaacaagacrgcatccatgtcctcaaaaccttcaa

SEQ ID NO: 38 - DNA, 51 bp, Homo sapiens
ttccttcatttattcattgacttgasagatattcactgagcaccaaccatg

SEQ ID NO: 39 - DNA, 51 bp, Homo sapiens
caaaagcatgtggaaacataatttcsaagcaaactgaagaccgtgaacgtg

SEQ ID NO: 40 - DNA, 51 bp, Homo sapiens
attgcatatagtcattccatggtgaragcaatataaagtctgtaagtctta

SEQ ID NO: 41 - DNA, 51 bp, Homo sapiens
tttttgttattcgttactaagatgasatagttagagctgcaagaaatgcat

SEQ ID NO: 42 - DNA, 51 bp, Homo sapiens
ttgctatttgcaaatttgtagtaccrcacacaaaaatgtagtacaagcttc

SEQ ID NO: 43 - DNA, 51 bp, Homo sapiens
tagacatactgagatatatattgaasaaaacactgaagaaaatttgagtta

SEQ ID NO: 44 - DNA, 51 bp, Homo sapiens
tcccttcacagatgggaattttatarctatcttgccccacaggctccattt

SEQ ID NO: 45 - DNA, 51 bp, Homo sapiens
aagcaaaaacagtaaagaatggtaaytgatcccagtaagaaaattgtgaat

SEQ ID NO: 46 - DNA, 51 bp, Homo sapiens
catatgtgttaaataaaggaataaaygaaggcactgttcactatcatttat

SEQ ID NO: 47 - DNA, 51 bp, Homo sapiens
ttttattataaaactatttcatttawttgaatcaccggtttcatattttta

SEQ ID NO: 48 - DNA, 51 bp, Homo sapiens
aaaaagaaaaaaaagaagtaagctargagaaaaaagagctggggactagca

SEQ ID NO: 49 - DNA, 51 bp, Homo sapiens
agacatgtgactgctctgggaaagastattcaaggaagaaggaacagcaaa

SEQ ID NO: 50 - DNA, 51 bp, Homo sapiens
agaagaatcagaaaaaaatggaccaygcagtgttggagcattaataaggct

SEQ ID NO: 51 - DNA, 51 bp, Homo sapiens
ccaaaaggagagttaactgcttagamctctgggtggactctgtgttgtact

SEQ ID NO: 52 - DNA, 51 bp, Homo sapiens
tcttttctgtgcatttgactagtacratccttccccaatcacaaataatat

SEQ ID NO: 53 - DNA, 51 bp, Homo sapiens
tctgatttgatttattatttgtctamaccaattgtataacttccttctaaa

SEQ ID NO: 54 - DNA, 51 bp, Homo sapiens
atctcacccctacttaaccaattccwcaatttagaatctgtcatctgcagc

SEQ ID NO: 55 - DNA, 51 bp, Homo sapiens
agaaatgaatgtgcaaactttagaaygctctacaaatattattattattgc

SEQ ID NO: 56 - DNA, 51 bp, Homo sapiens
ttattgagcgcaacacactcaattgraatggtgaattaatcttatacggtc

SEQ ID NO: 57 - DNA, 51 bp, Homo sapiens
taaaaatctagaattttcaatgtagyatatctgaatcctatttttttcctc

SEQ ID NO: 58 - DNA, 51 bp, Homo sapiens
gaaggatatcaatattcaagtagacraaggttatagaacactaagcagatt

SEQ ID NO: 59 - DNA, 51 bp, Homo sapiens
ataattgcttataatacacagactcrattttatatgactaattagaacagt

SEQ ID NO: 60 - DNA, 51 bp, Homo sapiens
tctaatatgcaaaatatattactccraacttaaagtgcaataagtagctgg

SEQ ID NO: 61 - DNA, 51 bp, Homo sapiens
ttttatgagatttaatgtaactatgyattacttcagacaagatacacatat

SEQ ID NO: 62 - DNA, 51 bp, Homo sapiens
gaatctcactttcagaaaaatgtgasatagaaacattatacctctacagca

SEQ ID NO: 63 - DNA, 51 bp, Homo sapiens
gcaatatttctgtaaggtaaggtaaygcaaagtgttgtcatcatttacttt

SEQ ID NO: 64 - DNA, 51 bp, Homo sapiens
tgggagggtgtatttgtccagaacaytgttcatttcttttagattttctag

SEQ ID NO: 65 - DNA, 51 bp, Homo sapiens
aaaataaataatatgaggcacaacaytggttagttggagttattttagtag

SEQ ID NO: 66 - DNA, 51 bp, Homo sapiens
tatttatgatggtcaataaaatccaratattacttcaagggtacaccaatc

SEQ ID NO: 67 - DNA, 51 bp, Homo sapiens
ctttctacctattttactcaaaagcrgctcttctaaaattgaggaaataag

SEQ ID NO: 68 - DNA, 51 bp, Homo sapiens
taacattgatgcagtgaggaaagcgraattgttgaataccttacccattta

SEQ ID NO: 69 - DNA, 51 bp, Homo sapiens
ttgacactttattttctacattgcayaaatcgtccacacagaaaatacatc

SEQ ID NO: 70 - DNA, 51 bp, Homo sapiens
ttacagaatccatgtagtcaaatacmattgaggatagttgtgtggtcacta

SEQ ID NO: 71 - DNA, 51 bp, Homo sapiens
tctgtccccagtataataaatatgtsatggagaagtaatatttaaaataat

SEQ ID NO: 72 - DNA, 51 bp, Homo sapiens
gagcagggatgagttggaaaaagtcyctgatgcctgtgttggcaaccggaa

SEQ ID NO: 73 - DNA, 51 bp, Homo sapiens
ttgctgtgaccctccatgggttgcckctctctggaaaggtgttaaaggggc

SEQ ID NO: 74 - DNA, 51 bp, Homo sapiens
taagaaaagaagagggaggcaccaayggcacccttgtccacctagaatttg

SEQ ID NO: 75 - DNA, 51 bp, Homo sapiens
gcaactggcaaaaaccaattcaggcycacttagacaaaaaaccaactagaa

SEQ ID NO: 76 - DNA, 51 bp, Homo sapiens
cttggaatcgaaggggagaccaggarcataaagaacacactggaaaggtgt

SEQ ID NO: 77 - DNA, 51 bp, Homo sapiens
ccagatgtatgaaaactcattttccragttaacactgagttccaaaaggtt

SEQ ID NO: 78 - DNA, 51 bp, Homo sapiens
cacctcatctttctcaatggcatcartaacagaacaaaatcaaatgaaagt

SEQ ID NO: 79 - DNA, 51 bp, Homo sapiens
ggattaggtcatcgtgttggatccaycatgtttgacagggttgcccagtgt

SEQ ID NO: 80 - DNA, 51 bp, Homo sapiens
tatagtttctcccaccactctatacyaaatttcactttaccaaaaatattg

SEQ ID NO: 81 - DNA, 51 bp, Homo sapiens
gttagggtatcccgaaattcaatgastagtttccttataagaaggccttgg

SEQ ID NO: 82 - DNA, 51 bp, Homo sapiens
acaagttctcagatggagaaaaaaartactgtgaaagaccctcatgaatct

SEQ ID NO: 83 - DNA, 51 bp, Homo sapiens
tccaccagggtgcaagctagttgaayagatatgttgtccaggtgttcaaga

SEQ ID NO: 84 - DNA, 51 bp, Homo sapiens
agtatgttccagtctgaggtacttaygagcctgaataccacggctcccagc

SEQ ID NO: 85 - DNA, 51 bp, Homo sapiens
gtgtctctctcatatctgagatttcyttctgcgcctcagacttggtcatgc

SEQ ID NO: 86 - DNA, 51 bp, Homo sapiens
ctatagttgccagcctgggtttccayctatatcttaataaccagagttgct

SEQ ID NO: 87 - DNA, 51 bp, Homo sapiens
gcacattttgattttgtgtagccagsaagagttatatacctcccagaccag

SEQ ID NO: 88 - DNA, 51 bp, Homo sapiens
aatatgacacagattactaatggtgsatcttaataaaaatatattttatct

SEQ ID NO: 89 - DNA, 51 bp, Homo sapiens
ctgctatttcctgcttccctttttcktcagattaattcacaacaatttagc

SEQ ID NO: 90 - DNA, 51 bp, Homo sapiens
atcttgccctatagcaccacagaatsaacagtaaataagatactattagca

SEQ ID NO: 91 - DNA, 51 bp, Homo sapiens
gtctgtaaagaagaaagtatgaatargctagtgagaactggcaaaaatccc

SEQ ID NO: 92 - DNA, 51 bp, Homo sapiens
ctggaggtcagaattctggtacaagyctaattggaaaaaagtccttgtgtc

SEQ ID NO: 93 - DNA, 51 bp, Homo sapiens
aatacttacttcgtagcttatacacrcaggcattttgttcttatcggaaca

SEQ ID NO: 94 - DNA, 51 bp, Homo sapiens
cttcaatggggtcagaaagtagtgamgctcctgggaggaggtaaaatagtg

SEQ ID NO: 95 - DNA, 51 bp, Homo sapiens
aggttatagccttagcaggatcaatraagacatgcaacaaagaaagtagca

SEQ ID NO: 96 - DNA, 51 bp, Homo sapiens
aatgtctcaaggagactaatagagarcaaactcagatttacctatgcagca

SEQ ID NO: 97 - DNA, 51 bp, Homo sapiens
tggtttacaccctacaaatttaaccmagagatacctttggatcgcccctgg

SEQ ID NO: 98 - DNA, 51 bp, Homo sapiens
ctctctctatccctgaggaggtaaartattatctcactccactctcagcta

SEQ ID NO: 99 - DNA, 51 bp, Homo sapiens
tgcctccctctgcctttctgataggratgtaatgataaatgatgactgcac

SEQ ID NO: 100 - DNA, 51 bp, Homo sapiens
cattcaaagcataagatccagagcayagaaaaaatgagtaatacatctgac

SEQ ID NO: 101 - DNA, 51 bp, Homo sapiens
gcatatacttccagaaactggagtcratgttaggaaagattccattctaag

SEQ ID NO: 102 - DNA, 51 bp, Homo sapiens
tagtactgttactgctgttactgtaygggaatcctaggttcttcttaactt

SEQ ID NO: 103 - DNA, 51 bp, Homo sapiens
catgagttcaacagttagagacctaktaggctttattcttcattctgagga

SEQ ID NO: 104 - DNA, 51 bp, Homo sapiens
gagaggctgcaaagtgggtaggcagraaatttgttacccaaacaataaact

SEQ ID NO: 105 - DNA, 51 bp, Homo sapiens
gcccacaatgagtggtcttccttcawgaaacttttaaataattcatggaac

SEQ ID NO: 106 - DNA, 51 bp, Homo sapiens
cccaaccaaactaggcacctggctayccccagaattaaatcttgaaactcc

SEQ ID NO: 107 - DNA, 51 bp, Homo sapiens
atgtaaaaaaaaaaaaaaaagaacamgaggaatataagagatttgcctcgc

SEQ ID NO: 108 - DNA, 51 bp, Homo sapiens
ggaatgaatgaatgttggaggagatsaatactgttgaattcaaagggtaac

SEQ ID NO: 109 - DNA, 51 bp, Homo sapiens
gttagacattgcgctgtagcagtccrcacaatatcacttgtcttctgggcc

SEQ ID NO: 110 - DNA, 51 bp, Homo sapiens
ccttgaaactattagactgtccatckcaatgtccgaaacagaggatggcct

SEQ ID NO: 111 - DNA, 51 bp, Homo sapiens
ggggtaatgcctaaaatgtcctttawacttgatccattataagtggttcat

SEQ ID NO: 112 - DNA, 51 bp, Homo sapiens
agattgattctttgagcatttaggayattcctcccttgtggatcatgatat

SEQ ID NO: 113 - DNA, 51 bp, Homo sapiens
atactactttatatcatagaacttgragaggaaatgaaaagatcagctgct

SEQ ID NO: 114 - DNA, 51 bp, Homo sapiens
gttagttattagcacagctcagtcargaaagtctatggcctgctccagggg

SEQ ID NO: 115 - DNA, 51 bp, Homo sapiens
ctattccatactgctgccttagtctyttctgcccttataatatttgacttt

SEQ ID NO: 116 - DNA, 51 bp, Homo sapiens
acatatgtacatgtccctaccactgyaaagttttcagcagtaaagatgctg

SEQ ID NO: 117 - DNA, 51 bp, Homo sapiens
agggaagaagaaaatctcatataagycaacattcaaactcaccacaataat

SEQ ID NO: 118 - DNA, 51 bp, Homo sapiens
gctaggaagggcagctcaagtcttaygtggttcattggttatagggcttgc

SEQ ID NO: 119 - DNA, 51 bp, Homo sapiens
ataagctccacagctgagtgccctgmaataacagactcctttctcgctcac

SEQ ID NO: 120 - DNA, 51 bp, Homo sapiens
tgttctggcctacagttcctctcaayctgagtagtgctcttttgcgactgg

SEQ ID NO: 121 - DNA, 51 bp, Homo sapiens
gcccagggatgacagcagagagggaygcagactatgggacattctaaatca

SEQ ID NO: 122 - DNA, 51 bp, Homo sapiens
tttcctgttagatgggtggtaagaaycagtcagagtttgtaaacccaccaa

SEQ ID NO: 123 - DNA, 51 bp, Homo sapiens
acttaggagactgcatttagaagtcragaaacctgctttcctgccccttcc

SEQ ID NO: 124 - DNA, 51 bp, Homo sapiens
ttattggctaggagaagtaaagaaakgtctgattcgaggtgaagatgctcc

SEQ ID NO: 125 - DNA, 51 bp, Homo sapiens
aaagcaggagccttcaaaggatacaraggtctccctcactgcccttgggaa

SEQ ID NO: 126 - DNA, 51 bp, Homo sapiens
tatattgtactctttagatcgcccaygtgtaaccaccaatgtgttcatatt

SEQ ID NO: 127 - DNA, 51 bp, Homo sapiens
gaagaaaaggagggagcgtatgtaasatcacacgagcctctggatggagac

SEQ ID NO: 128 - DNA, 51 bp, Homo sapiens
agctcacaggaagtgcagctccctarggaaaaacagactctctcttatgct

SEQ ID NO: 129 - DNA, 51 bp, Homo sapiens
attttgttctaatttttgtgtggtcycttgaaagattggattgactttcta

SEQ ID NO: 130 - DNA, 51 bp, Homo sapiens
gaagagatttgataaatagcgaaaaygtgaacttacagtcttcaaacaaaa

SEQ ID NO: 131 - DNA, 51 bp, Homo sapiens
taggtctaactgctggaaaccgtcamtctccataatgaaacaaaacaacta

SEQ ID NO: 132 - DNA, 51 bp, Homo sapiens
ttaaaggacttggggaatattaaaaygtgtgcagagaacagaggggagcat

SEQ ID NO: 133 - DNA, 51 bp, Homo sapiens
ttcccttaaggttgtacatcttgaawtaagataccttggctctatctaggc

SEQ ID NO: 134 - DNA, 51 bp, Homo sapiens
gtcagaatgtactacaaacagaaaawtcgtttcataaattattgctgttac

SEQ ID NO: 135 - DNA, 51 bp, Homo sapiens
agttgggagacatattcctgtcatayattatcaagtctgttggtattcaaa

SEQ ID NO: 136 - DNA, 51 bp, Homo sapiens
cccttctatcaacacaacagtaggaraaactccagctggcatatcggtcta

SEQ ID NO: 137 - DNA, 51 bp, Homo sapiens
tttctgatcactttatttgtagaagragttcctagcctacatggaaagtta

SEQ ID NO: 138 - DNA, 51 bp, Homo sapiens
tagtcctgggcttttctttgatagaracttttcattattgatacaatttcc

SEQ ID NO: 139 - DNA, 51 bp, Homo sapiens
ctcaactgaggagacagttggataarcatacctttttgaatgtccgtgacc

SEQ ID NO: 140 - DNA, 51 bp, Homo sapiens
tgtgacgtttccatctggaaatgctraaataaggttcctcttccccaccaa

SEQ ID NO: 141 - DNA, 51 bp, Homo sapiens
tttgagtgcagaaagtctcatataaktatttactcactgtgtgttgattac

SEQ ID NO: 142 - DNA, 51 bp, Homo sapiens
ttttgtttagcaattctaccattaayactaatttctaagcaagtcagtccc

SEQ ID NO: 143 - DNA, 51 bp, Homo sapiens
ggcctggggctgaaagtcaccagttrccagagctgcaaattttttaatgta

SEQ ID NO: 144 - DNA, 51 bp, Homo sapiens
gatacaaatgagaacaatcgcttgaragtgaatatggtagcatctgacgaa

SEQ ID NO: 145 - DNA, 51 bp, Homo sapiens
ttgttgattgagaataaagcataaasgaaactaaaaccatcgtgcatttat

SEQ ID NO: 146 - DNA, 51 bp, Homo sapiens
accacaatagcctactccaaccaaaytgactcacctgtctgactacgaatc

SEQ ID NO: 147 - DNA, 51 bp, Homo sapiens
cctcagcgcagcatctgcagactacratttagcaccagaagacgctcgcgc

SEQ ID NO: 148 - DNA, 51 bp, Homo sapiens
agactacgatttagcaccagaagacrctcgcgccgggaaccccaaattcct

SEQ ID NO: 149 - DNA, 51 bp, Homo sapiens
ggaatggccttagccctatccacaarctcagaataactaacgatttacttg

SEQ ID NO: 150 - DNA, 51 bp, Homo sapiens
gcctttcccagctttcactcgccacraaataaatagcttctgtcaaggagc

SEQ ID NO: 151 - DNA, 51 bp, Homo sapiens
acaataaagctgttgaattttaacargagtattagtacataaattttctac

SEQ ID NO: 152 - DNA, 51 bp, Homo sapiens
agatagctgtctggggagctacatasagacacagcactagcttggtaccca

SEQ ID NO: 153 - DNA, 51 bp, Homo sapiens
tcccaccagcttgtaaaggcagagaygaggttccttgcagatctttctgaa

SEQ ID NO: 154 - DNA, 51 bp, Homo sapiens
cctccagagaaaaggtcctgcagacrgtattaagcctaatccagaatagtt

SEQ ID NO: 155 - DNA, 51 bp, Homo sapiens
acagaagtctgaactagaactgagarccaaaaacgctgaggtcgggaaaac

SEQ ID NO: 156 - DNA, 51 bp, Homo sapiens
tcatgtgtagccttggctagcgagcsactgttcttctgatataaactcttc

SEQ ID NO: 157 - DNA, 51 bp, Homo sapiens
acaggcccttatagtgccatttccargttcgctttgggcagagatgcaggg

SEQ ID NO: 158 - DNA, 51 bp, Homo sapiens
ttaagatagcaacaccaatagtttcratctttcctggacatatattcaact

SEQ ID NO: 159 - DNA, 51 bp, Homo sapiens
aaaaacctcctaaggccactccacamgattgaagttgaaactctctcactt

SEQ ID NO: 160 - DNA, 51 bp, Homo sapiens
gacatagattccaggtattaggttayaggcatccttgggagaccatttttc

SEQ ID NO: 161 - DNA, 51 bp, Homo sapiens
tttccttgaagacttgaaggacttayatagagagtcatggtagcactccag

SEQ ID NO: 162 - DNA, 51 bp, Homo sapiens
cagatcaaaaaagcatccaagaaccrctagggcaaccaggttctggagagt

SEQ ID NO: 163 - DNA, 51 bp, Homo sapiens
aatatttattacacaaatgaaccaakgaatactggatatggacacttttcc

SEQ ID NO: 164 - DNA, 51 bp, Homo sapiens
gattacattaaactttacatgcaatraccttaaattgaaaaaaaaaatctc

SEQ ID NO: 165 - DNA, 51 bp, Homo sapiens
tggtaatcttaaatggcaattgttayacagagaggcatctaagggatacag

SEQ ID NO: 166 - DNA, 51 bp, Homo sapiens
catccagttgtaccctcttgccaagkttgatggatatatctgatgtcatta

SEQ ID NO: 167 - DNA, 51 bp, Homo sapiens
actaggctcctagtatcatcggtaasaaacttatgtatgtatactgtgggt

SEQ ID NO: 168 - DNA, 51 bp, Homo sapiens
gaaacaaacaagtaatttcattatarcatgtgctcatattgaaatttcaga

SEQ ID NO: 169 - DNA, 51 bp, Homo sapiens
tcatcattactatttgagttcaaacrccaacaagaaaacaaagaaaagtac

SEQ ID NO: 170 - DNA, 51 bp, Homo sapiens
taactctgctactgattatctttgcratttttaggaagtgtaccattcttt

SEQ ID NO: 171 - DNA, 51 bp, Homo sapiens
atgtttctatttgatagttgtaaaaycacctcttcatctttgctattgtct

SEQ ID NO: 172 - DNA, 51 bp, Homo sapiens
atacaaagccatttcacataaatacmactgtaatagtttttcctcatgaga

SEQ ID NO: 173 - DNA, 51 bp, Homo sapiens
tatccacacctattttacagatgaamagattgaggtcagaggagctaagca

SEQ ID NO: 174 - DNA, 51 bp, Homo sapiens
ggcattgcattgatttcattggaaarccttttcatcataaacaacaaatag

SEQ ID NO: 175 - DNA, 51 bp, Homo sapiens
attcaagtcctaaggtatataatttsaaaccatggtcacagttgctaaaaa

SEQ ID NO: 176 - DNA, 51 bp, Homo sapiens
gtgattataaatcagaacatctcttyttgttctcatggtttaaaaatctga

SEQ ID NO: 177 - DNA, 51 bp, Homo sapiens
tgtcaaaaactgttacctctttttargtacttgtctttgtgaatcaaaacg

SEQ ID NO: 178 - DNA, 51 bp, Homo sapiens
agttctgaaagaccatagggatgackactacacaaacagaaatcaactatt

SEQ ID NO: 179 - DNA, 51 bp, Homo sapiens
aaaacctatttttgtaagccacataytaaaaatcactttaaaaaatcaaat

SEQ ID NO: 180 - DNA, 51 bp, Homo sapiens
cttcaacccatactccaggaaattamcacataatattattaggcagatatg

SEQ ID NO: 181 - DNA, 51 bp, Homo sapiens
atttgttttctctatgtcaaacttcrtatcacttgacatggagatgtgaac

SEQ ID NO: 182 - DNA, 51 bp, Homo sapiens
ttcagatgacctaaggctaccacaasgattaagtaatgacaatttccccat

SEQ ID NO: 183 - DNA, 51 bp, Homo sapiens
agtctcctgcttagaccagatttcayggcaatcccttgaaactcatttgag

SEQ ID NO: 184 - DNA, 51 bp, Homo sapiens
caggctcatcttctacagttgcaacsaattaacaaaggtagagtttcctaa

SEQ ID NO: 185 - DNA, 51 bp, Homo sapiens
agccagtgcaaacacgtatttgttgmatgttgttgaagagagtgtaaaatg

SEQ ID NO: 186 - DNA, 51 bp, Homo sapiens
catctgtagtgtttcgtctgcaagtraattaacatatgccctattcagcac

SEQ ID NO: 187 - DNA, 51 bp, Homo sapiens
atcaaaattgtagtagacttcttagyagacattgataagtttagcctaaaa

SEQ ID NO: 188 - DNA, 51 bp, Homo sapiens
tagccagggtctattccaggtatcamatgccctgtatcagatgcccctgtc

SEQ ID NO: 189 - DNA, 51 bp, Homo sapiens
gcaatagttgcaagatgtaagatcayccaaagagtatgcagagggaaatga

SEQ ID NO: 190 - DNA, 51 bp, Homo sapiens
ttataatgaagaggtttcagaggaaktacatgtatcccttaaaagtgcttt

SEQ ID NO: 191 - DNA, 51 bp, Homo sapiens
gaaaaccgatgtgcctttttgcttcmcatgtttaactaaagtcggttataa

SEQ ID NO: 192 - DNA, 51 bp, Homo sapiens
atttataaaaggagaacaccaaataktatttcatgaaacagactcaataag

SEQ ID NO: 193 - DNA, 51 bp, Homo sapiens
agtcaaaaagctcaagatggtctcartcaataactttgcaactaccaacta

SEQ ID NO: 194 - DNA, 51 bp, Homo sapiens
gctgtgctcaaaattgtacaaggaamtgttttaatgaccaattaattcaga

SEQ ID NO: 195 - DNA, 51 bp, Homo sapiens
gaaactcagataagctgaggacaaamattaaatcagcagtggaattataac

SEQ ID NO: 196 - DNA, 51 bp, Homo sapiens
gaaaatatctatgaaactttactatstgaatgtgtactacctgggcacact

SEQ ID NO: 197 - DNA, 51 bp, Homo sapiens
atattttgctaaatcatctattcagragtcctctagtttctttatgaccct

SEQ ID NO: 198 - DNA, 51 bp, Homo sapiens
tcttgaataattgatgtagctaaagwcaattattcataccaggcttagctt

SEQ ID NO: 199 - DNA, 51 bp, Homo sapiens
cctcactagattgtgggtcattagayagatatttaggttaagtattttgca

SEQ ID NO: 200 - DNA, 51 bp, Homo sapiens
acacacacacacacacgttttcttaygatggatgtaacatgagaccagaaa

SEQ ID NO: 201 - DNA, 51 bp, Homo sapiens
aaaaagcagggaaacaaaataatgayagatgacaagcattgctgtgctggt

SEQ ID NO: 202 - DNA, 51 bp, Homo sapiens
tgtgttaaagcccattgccttcctcrataaaataaagcatgatacccagga

SEQ ID NO: 203 - DNA, 51 bp, Homo sapiens
gattacctgaacaaggtagtaacacygagcattgaaataaatggacagatt

SEQ ID NO: 204 - DNA, 51 bp, Homo sapiens
cagtggaagggtgattcctaagaaastgctatatcttctgtgtctttcctt

SEQ ID NO: 205 - DNA, 51 bp, Homo sapiens
cccagttttgaatcatgtggtactcyatatccagtttgcctttttcatgga

SEQ ID NO: 206 - DNA, 51 bp, Homo sapiens
ctggctgtggttccctatgaattcamcacaagtagtccctattaccctaca

SEQ ID NO: 207 - DNA, 51 bp, Homo sapiens
gcttcatactgaccatctattgcacrgattattgtttaaagtgctaccaga

SEQ ID NO: 208 - DNA, 51 bp, Homo sapiens
attgatttaattgataataattagamaaactgaactaaatttttttaacag

SEQ ID NO: 209 - DNA, 51 bp, Homo sapiens
gattcttagattgaaggctgagggarctaattgcaggtacaaaaattgcac

SEQ ID NO: 210 - DNA, 51 bp, Homo sapiens
ggcccataatgagacaaacgtgaaayagttgaggtgatctagagacatctt

SEQ ID NO: 211 - DNA, 51 bp, Homo sapiens
gcttaggtttactctttattgtcacractaaatatgctctgaagattaagc

SEQ ID NO: 212 - DNA, 51 bp, Homo sapiens
cttgcctatctttcgttgaaacacartagcattacaagggtaattattagt

SEQ ID NO: 213 - DNA, 51 bp, Homo sapiens
gtcaaggtaaagtaatgttgtagtartaagtccagtgcttctggttttgat

SEQ ID NO: 214 - DNA, 51 bp, Homo sapiens
cagcaatgcaaatcaaaaagtatacrcatattttgaaacaagacaaagccg

SEQ ID NO: 215 - DNA, 51 bp, Homo sapiens
ctagtgtctgcttcaaacaggctaawcaaatctacatttcttcctttgaag

SEQ ID NO: 216 - DNA, 51 bp, Homo sapiens
tacattctaaaacagatccgatgggyatatcgcctggataaaattattctg

SEQ ID NO: 217 - DNA, 51 bp, Homo sapiens
acttatttttctgttcattagaataycttgtgttcaaagctgacttccttt

SEQ ID NO: 218 - DNA, 51 bp, Homo sapiens
aacaatcagatctctcaggaacgaayagagaaagagttcatttattactgc

SEQ ID NO: 219 - DNA, 51 bp, Homo sapiens
cacttggggaaagctccagacgatastaaacctatgagttgaagcttgggg

SEQ ID NO: 220 - DNA, 51 bp, Homo sapiens
ttagctgacacattccatattacaaratgccttttctgaaattactttttc

SEQ ID NO: 221 - DNA, 51 bp, Homo sapiens
tctgtaagtgttggaatggagtccaragacattagcagcgaacgtaggagc

SEQ ID NO: 222 - DNA, 51 bp, Homo sapiens
tgattataaaatgcacataaaaaagyaaagattcaagaagagaagaaaaaa

SEQ ID NO: 223 - DNA, 51 bp, Homo sapiens
tcacaggaccttcatcaaaattaaakggtacatcataagaaagcatctatg

SEQ ID NO: 224 - DNA, 51 bp, Homo sapiens
actctgcttgagaagtttcctagcartaaatgaatagtctcttaggtgata

SEQ ID NO: 225 - DNA, 51 bp, Homo sapiens
tatactatgctgctgtccatttgtarggagctatatttcccagttgtaaaa

SEQ ID NO: 226 - DNA, 51 bp, Homo sapiens
ctgaaattttcatttctgtagatgaygtatattttttatcttttttctgtg

SEQ ID NO: 227 - DNA, 51 bp, Homo sapiens
gaggctctttataatattttcactaygtatcattttgcaagaaaatttccg

SEQ ID NO: 228 - DNA, 51 bp, Homo sapiens
gacaaataaacctttgctgttttaasctactgaggtcttgggactggttgg

SEQ ID NO: 229 - DNA, 51 bp, Homo sapiens
ctggcagctcttgttatagtatttckcagttttcaatgaagtgtccatgca

SEQ ID NO: 230 - DNA, 51 bp, Homo sapiens
aataaaactagacaccttaagaggcyacgttgattaacatatttcatacag

SEQ ID NO: 231 - DNA, 51 bp, Homo sapiens
tgaaattacctggctttcttctggtygaattgggaataaattcaagtttcc

SEQ ID NO: 232 - DNA, 51 bp, Homo sapiens
gtcaatactgcccttcttttcacatrgttaaccaatcaatcaaattatcat

SEQ ID NO: 233 - DNA, 51 bp, Homo sapiens
aacctggggaaagaaaacacataacyatgctatatagacactacccaagcc

SEQ ID NO: 234 - DNA, 51 bp, Homo sapiens
gaatacgacaattgaaaatttcaaakgtctggagagtaaacaattgtttga

SEQ ID NO: 235 - DNA, 51 bp, Homo sapiens
tgagccaccatgcctggcagatttayattgttcaaaataacgtcactttta

SEQ ID NO: 236 - DNA, 51 bp, Homo sapiens
atagatttgatgtgaatattatgcartctacaaaataaacatgttaaaata

SEQ ID NO: 237 - DNA, 51 bp, Homo sapiens
gtatgatttaatgtatttttgatagratggtggatattgtctcttgtctca

SEQ ID NO: 238 - DNA, 51 bp, Homo sapiens
atatgaactgtgattacgaggataaracacattaagagaggagtcacagaa

SEQ ID NO: 239 - DNA, 51 bp, Homo sapiens
ctctttttcaactgaaaatgtttccyatttcaaagataaggcccttaatag

SEQ ID NO: 240 - DNA, 51 bp, Homo sapiens
tctttctttctctgtagaccacacaygtttgaaaactgggaagctaatata

SEQ ID NO: 241 - DNA, 51 bp, Homo sapiens
tagatctagaacatgaacccaaagartccaatacatggtcaatgtgattta

SEQ ID NO: 242 - DNA, 51 bp, Homo sapiens
aaaaaaaaaaaagaaaagtcgaccayattattactttctagtcacattttt

SEQ ID NO: 243 - DNA, 51 bp, Homo sapiens
atcaaaatgaaagctgagacatcctwagatcctggaaagtgcccaaaggtt

SEQ ID NO: 244 - DNA, 51 bp, Homo sapiens
gttgttttcagttgcacataaatgartcattattacagatgtttaaccaaa

SEQ ID NO: 245 - DNA, 51 bp, Homo sapiens
tgccctctcaatatcctgcaacctakgctctcagtttcagtgttagtacta

SEQ ID NO: 246 - DNA, 51 bp, Homo sapiens
gactccctagaatttaagtccaaagmatggtgtgattttctttgttgagct

SEQ ID NO: 247 - DNA, 51 bp, Homo sapiens
gtagatagtaagcgtaattttcataycacaggcaagaaagtcaaagagtca

SEQ ID NO: 248 - DNA, 51 bp, Homo sapiens
tattctatgccaagaacttgtgctgyaagataaaagaatgtgactgtagta

SEQ ID NO: 249 - DNA, 51 bp, Homo sapiens
acaagtgtgtgcaaatagttgcccartggacaccagtgcttgttctctctc

SEQ ID NO: 250 - DNA, 51 bp, Homo sapiens
gagttttaaaataagactcaaactasaatctcggcttagtttattgctaca

SEQ ID NO: 251 - DNA, 51 bp, Homo sapiens
caccacagacagagaactagagctargtttacataactgaaccttactaaa

SEQ ID NO: 252 - DNA, 51 bp, Homo sapiens
gaaatggaaggttggctctaggaccrgatgcatcaggcttcaggtaggctc

SEQ ID NO: 253 - DNA, 51 bp, Homo sapiens
tctgttactatcactgtagtctgaamcaatattatcttttacctagaccat

SEQ ID NO: 254 - DNA, 51 bp, Homo sapiens
aaagggcaaaacagctataccaaagraagggaataaactattttaaaagct

SEQ ID NO: 255 - DNA, 51 bp, Homo sapiens
cctaatggctggaagcctagatgagwcatgtgattgaagaacacaacaata

SEQ ID NO: 256 - DNA, 51 bp, Homo sapiens
gctttaattttgaaaggcgtggatayattaatgagtgttaaacttgcagag

SEQ ID NO: 257 - DNA, 51 bp, Homo sapiens
gaaattttaacttatgcctcaattamagtaatagcatctcacattcaataa

SEQ ID NO: 258 - DNA, 51 bp, Homo sapiens
aaactcaaagagatttttcaacatcygataacctgcatacagttctttcag

SEQ ID NO: 259 - DNA, 51 bp, Homo sapiens
tagtaatcaagacctggttcgaaagmatgtaccagtgctagcaggagataa

SEQ ID NO: 260 - DNA, 51 bp, Homo sapiens
caggcttattagactgtgggatcaayctctttaagaaagcattttgcagaa

SEQ ID NO: 261 - DNA, 51 bp, Homo sapiens
tgaactctttggatcccaatcttaartctaatcaaatcaaaataaatatat

SEQ ID NO: 262 - DNA, 51 bp, Homo sapiens
ggtctcaagtgctagaaccaaaattyaacatggccaggactctttctttga

SEQ ID NO: 263 - DNA, 51 bp, Homo sapiens
atgcttgggaacatgttctaggtaartagctccaatggaatgaagttttct

SEQ ID NO: 264 - DNA, 51 bp, Homo sapiens
atggtggccggcaagaaattgaccawctctaaatattggtatagcttagtg

SEQ ID NO: 265 - DNA, 51 bp, Homo sapiens
cagtcatttggagtcctccctctcastcattcacagcttacttgtcactgt

SEQ ID NO: 266 - DNA, 51 bp, Homo sapiens
aacctcagccactcattgtggagtcyaattacatcttgtccaaattatcat

SEQ ID NO: 267 - DNA, 51 bp, Homo sapiens
tatccaagctattccaagatgattaygatctttcttgtcttatgtatgaga

SEQ ID NO: 268 - DNA, 51 bp, Homo sapiens
tctggcacaagtactaagaacttackctcttcagtatggagaaaaatgctg

SEQ ID NO: 269 - DNA, 51 bp, Homo sapiens
caaatgaacatatcaatcgcctgttsaaattttacagtacactttggagac

SEQ ID NO: 270 - DNA, 51 bp, Homo sapiens
gtctttacgttatcatctaatagccmatccggaattacgaaacaataactt

SEQ ID NO: 271 - DNA, 51 bp, Homo sapiens
ttttataggctgagataactagcaamttattgccaaggtactagtacaatt

SEQ ID NO: 272 - DNA, 51 bp, Homo sapiens
tctgggctgtagaccttcaaatagaygcaaacatgcaaagcttttaaaagc

SEQ ID NO: 273 - DNA, 51 bp, Homo sapiens
aaaccaaagtatattttcatgaatcraatgttcaaatagtaagatttaaga

SEQ ID NO: 274 - DNA, 51 bp, Homo sapiens
agcaaaatatctaaattcaaaataarcctctaacttagctttcaagcctat

SEQ ID NO: 275 - DNA, 51 bp, Homo sapiens
tggaagctacctgatttctctattamattaggataaatgtacagtgcaaat

SEQ ID NO: 276 - DNA, 51 bp, Homo sapiens
attgtattatgattcaatttaatcaygttttgtgttggaacccctccccac

SEQ ID NO: 277 - DNA, 51 bp, Homo sapiens
tcaagctttgcatcttaccattcctraagacatccttgatcatatttagcc

SEQ ID NO: 278 - DNA, 51 bp, Homo sapiens
atctagaaacagaggaaaagagtgamgtgcgagctttattcgcaatgtctg

SEQ ID NO: 279 - DNA, 51 bp, Homo sapiens
gtatggatatagaatgaaaaaaaccrcataaatccagtacatctacttaag

SEQ ID NO: 280 - DNA, 51 bp, Homo sapiens
ttatattttaaatgtaaatgcaaaasttaattattttttagaggacctgat

SEQ ID NO: 281 - DNA, 51 bp, Homo sapiens
atatttcttttcgatcatctctttawatatcttttcacctatttataatca

SEQ ID NO: 282 - DNA, 51 bp, Homo sapiens
ttatgaatattcttattttgtgaatkaatgctaataaatactatggttact

SEQ ID NO: 283 - DNA, 51 bp, Homo sapiens
tcaggaacaaattgtggaagtccaakagataggatggtaacttgcactgca

SEQ ID NO: 284 - DNA, 51 bp, Homo sapiens
gctctagggttggcacatggatgaawgattgcagtaaccgtggtaagggat

SEQ ID NO: 285 - DNA, 51 bp, Homo sapiens
ctgttagttatatgagttgagataayagccatcagagcttaccatttcctt

SEQ ID NO: 286 - DNA, 51 bp, Homo sapiens
attctaaattactggggatcattcartaaggaaatggtaagctctgatggc

SEQ ID NO: 287 - DNA, 51 bp, Homo sapiens
actttttgtctttaggttgagtggawcttataaactggttcttccatgtaa

SEQ ID NO: 288 - DNA, 51 bp, Homo sapiens
tgtctgttccaacaccacagttgatrgtagtacatagtctgagagccttca

SEQ ID NO: 289 - DNA, 51 bp, Homo sapiens
ccaacttatgcagaagatgtacagaycattagttttgcaggcacagccaga

SEQ ID NO: 290 - DNA, 51 bp, Homo sapiens
catcggatgggtagtaactagatacwctaatgcaaaagttggggatacaga

SEQ ID NO: 291 - DNA, 51 bp, Homo sapiens
agctcaattttaaatttagtaacaayatgaacttgaaactatgctttgggg

SEQ ID NO: 292 - DNA, 51 bp, Homo sapiens
atttactctgcttccaggaatacctyagctgttatcaataagcagtccttt

SEQ ID NO: 293 - DNA, 51 bp, Homo sapiens
cttggttagaattgagtacttgagaractatatgaataattgcttgttgaa

SEQ ID NO: 294 - DNA, 51 bp, Homo sapiens
ctagactttccaaagcttttaggccraaacactcgagttccaggaagaaag

SEQ ID NO: 295 - DNA, 51 bp, Homo sapiens
gggtcctgggataacctgttgaagasgaatttgagaaggccaaaatggtat

SEQ ID NO: 296 - DNA, 51 bp, Homo sapiens
ggtttctaattgtctttttctgatayatggaaataatggaggtctcctcaa

SEQ ID NO: 297 - DNA, 51 bp, Homo sapiens
tgcttatgaaggagtctccttaacaytggattaacaacacctttccctgga

SEQ ID NO: 298 - DNA, 51 bp, Homo sapiens
ttgaagactgccttgcacattgtcartactatgctagtgttagccattatt

SEQ ID NO: 299 - DNA, 51 bp, Homo sapiens
gaattacagaataaataataggccargtttccttagagagttgagaactct

SEQ ID NO: 300 - DNA, 51 bp, Homo sapiens
ttttgtgagtttgctgggagaaggtraaatcatagtctggagagtagaaga

SEQ ID NO: 301 - DNA, 51 bp, Homo sapiens
cccttgggccaaatatgaaaagcctmacattgcacatggagcccttgggta

SEQ ID NO: 302 - DNA, 51 bp, Homo sapiens
gtttactgaatggatgccaaaaatasaaatgaggaatgctgttctagccct

SEQ ID NO: 303 - DNA, 51 bp, Homo sapiens
tgtatagaacttttaggcatcagtaycattctgtctaatgacataaacata

SEQ ID NO: 304 - DNA, 51 bp, Homo sapiens
atgttaaaatagttaaacacttgcaytcatctcatcctattaaaggaactc

SEQ ID NO: 305 - DNA, 51 bp, Homo sapiens
attaaaggaactccatcagggaacartgaggtaacatgtttggtgacagca

SEQ ID NO: 306 - DNA, 51 bp, Homo sapiens
tagtcttttctaattttctcacaacygtagcatttattttctcgttgacat

SEQ ID NO: 307 - DNA, 51 bp, Homo sapiens
aggaaagtgaagtcatttgagaagargtttatgttttcctctgtctaactt

SEQ ID NO: 308 - DNA, 51 bp, Homo sapiens
aaagctttaaatatcattttctcacrgtatattggaggccagactagttta

SEQ ID NO: 309 - DNA, 51 bp, Homo sapiens
gtagatttactgatgttactaaggakgtcctgaacaatattctcagccact

SEQ ID NO: 310 - DNA, 51 bp, Homo sapiens
ttgaacacctttagatatccataacraactaaggaactatacaagtttgct

SEQ ID NO: 311 - DNA, 51 bp, Homo sapiens
atgactctggaataatttgcagaagraaaagatggaatcatttgtgaacct

SEQ ID NO: 312 - DNA, 51 bp, Homo sapiens
gccataactttgttgtagctgtccaraatgttctaagggatgttatatctc

SEQ ID NO: 313 - DNA, 51 bp, Homo sapiens
aaatatgagtttctctgaaagaatasaaaaaatagaaacacctggaaacaa

SEQ ID NO: 314 - DNA, 51 bp, Homo sapiens
ttgatttagagagagcttaccgatawaagtaagctgtctcactgtgtatcc

SEQ ID NO: 315 - DNA, 51 bp, Homo sapiens
agtagctatcttccagtagcctggcrgaagagtagatacttactccttaga

SEQ ID NO: 316 - DNA, 51 bp, Homo sapiens
agattcatacctgagtatttacttayaatttagataaagcctttgttcctt

SEQ ID NO: 317 - DNA, 51 bp, Homo sapiens
ggaaaaataggtttcgttcttgccarataagacaaaggttgaaatcaatgc

SEQ ID NO: 318 - DNA, 51 bp, Homo sapiens
tgagatgatttggagatatatagacsatcaataatttttacagactctaga

SEQ ID NO: 319 - DNA, 51 bp, Homo sapiens
aactacaaatataataacatgttaayacaatcttcaggatagttactgggt

SEQ ID NO: 320 - DNA, 51 bp, Homo sapiens
attctttagccttttcttaaagtaasctgctaagtatttacaggttaattt

SEQ ID NO: 321 - DNA, 51 bp, Homo sapiens
ttccttgaccctaataatgtatcacyctgaattgctatttttatttatgct

SEQ ID NO: 322 - DNA, 51 bp, Homo sapiens
gctttgagaaaaaaaaggaattacgraaagtggcaaatgctgacagaaagg

SEQ ID NO: 323 - DNA, 51 bp, Homo sapiens
gttctggccactttttactctgtaayatctctcatctctttatactcacac

SEQ ID NO: 324 - DNA, 51 bp, Homo sapiens
gttggaagaaacaaagaaaagaaccyagatactctggaggaaatgtaatgc

SEQ ID NO: 325 - DNA, 51 bp, Homo sapiens
ttgtaaagtttatctgctattattawctcctgaatttattttaacccctcg

SEQ ID NO: 326 - DNA, 51 bp, Homo sapiens
tgagactaaaggaacttattcctcaraccctagtgaaaggtaccacaaaat

SEQ ID NO: 327 - DNA, 51 bp, Homo sapiens
tgcaaggaagatagggagagatataygggtaaagagaaggctagaaggttt

SEQ ID NO: 328 - DNA, 51 bp, Homo sapiens
ctgctgttagcctgatgtatctccargttttaaaatatttaaatagatgtg

SEQ ID NO: 329 - DNA, 51 bp, Homo sapiens
ggaaaaacagaaatacacagtgggtsaacttaaataaagagattgttgtgg

SEQ ID NO: 330 - DNA, 51 bp, Homo sapiens
gtttgatctctaagtcccatgtctamaacttaagatcatggctgacataaa

SEQ ID NO: 331 - DNA, 51 bp, Homo sapiens
aggaacagcagggaatggtaagtgartaggaagttcaggctaagtatcaga

SEQ ID NO: 332 - DNA, 51 bp, Homo sapiens
gagaacataactgctttgactccaayaagggtagagaaagtgggaaggggt

SEQ ID NO: 333 - DNA, 51 bp, Homo sapiens
aatcctaatcccaattcctgtgtcayacagtttttacaatactaaacagaa

SEQ ID NO: 334 - DNA, 51 bp, Homo sapiens
aaccattcagtaatatatgtgttcgrctttatatctgcctttaccaattac

SEQ ID NO: 335 - DNA, 51 bp, Homo sapiens
gtcattttatgaaactcatttgtaaygtttatctctgaagatgtatttgag

SEQ ID NO: 336 - DNA, 51 bp, Homo sapiens
cacaaagatttaacgcctcaatagarcaaaagctgttcagttaattttaat

SEQ ID NO: 337 - DNA, 51 bp, Homo sapiens
atgtgctcaagtctgttttgaataakgaagttggactctgggaagtcttgt

SEQ ID NO: 338 - DNA, 51 bp, Homo sapiens
gatgggggagtgcttttatggcaaamgtcgatatttaagaagtttgttcta

SEQ ID NO: 339 - DNA, 51 bp, Homo sapiens
tctggaaaaggatgagcagtctaggrttctgatgaatggggtacacattac

SEQ ID NO: 340 - DNA, 51 bp, Homo sapiens
aattggagaagctgaagccaaccacracttcataaagataagacatttact

SEQ ID NO: 341 - DNA, 51 bp, Homo sapiens
atatatttaaacacatgcaggtacamggttttcagttaagtttgtgttggg

SEQ ID NO: 342 - DNA, 51 bp, Homo sapiens
gtttttgttatagctaacagagaaaygctagccaaggattttattgctggc

SEQ ID NO: 343 - DNA, 51 bp, Homo sapiens
ttagtaccgcactgtcatccaggaarggcaatttcagttttacttgtttcc

SEQ ID NO: 344 - DNA, 51 bp, Homo sapiens
gtaagcctaacactgtcgtattatayagattacacagttcataattatgta

SEQ ID NO: 345 - DNA, 51 bp, Homo sapiens
ttctaagaaaaaaggcctctaaaaarcaaatatgaaaagtaagacagaatt

SEQ ID NO: 346 - DNA, 51 bp, Homo sapiens
aagaaagagtgtcctaccaagcaaamgtggatctcaaagctcagaaggcac

SEQ ID NO: 347 - DNA, 51 bp, Homo sapiens
tgccagattaaacaccataaaaaatytaccagttagtggatattttactta

SEQ ID NO: 348 - DNA, 51 bp, Homo sapiens
taaaccatgcttttactaaattactracttttctggtcaagtggacagatt

SEQ ID NO: 349 - DNA, 51 bp, Homo sapiens
aactgtgacccattcagaagttctayctcctaagactttcccaaaggtgac

SEQ ID NO: 350 - DNA, 51 bp, Homo sapiens
ttctggatccatcatcttatttaacrcttaaaacagctgtggttagaactt

SEQ ID NO: 351 - DNA, 51 bp, Homo sapiens
aagttgtttaacacttgtatttataraattgaccatgtttatgtcaaaaga

SEQ ID NO: 352 - DNA, 51 bp, Homo sapiens
atttacttttcgctatctcttcttayatagacgtgtttaaatatttcatta

SEQ ID NO: 353 - DNA, 51 bp, Homo sapiens
gagcgaagctttggcaaaaatgtaawgccgtgcagcacagtaagtctttgc

SEQ ID NO: 354 - DNA, 51 bp, Homo sapiens
agagaagcaatgcagttgcaagaaarttgactataatcatagataagctgt

SEQ ID NO: 355 - DNA, 51 bp, Homo sapiens
aaagtgattggtctaaagttaagaasataactcacagaggtgaaattagca

SEQ ID NO: 356 - DNA, 51 bp, Homo sapiens
agactttacaaatgctgaaactttargtaaaagatgagtacataaatttga

SEQ ID NO: 357 - DNA, 51 bp, Homo sapiens
gcccactctaatcacaaatgcgatargtctaattctctccactttgggatc

SEQ ID NO: 358 - DNA, 51 bp, Homo sapiens
aaatgtgtaggaatagcagagggtcratatttagacagccattctcactcc

SEQ ID NO: 359 - DNA, 51 bp, Homo sapiens
tattttactaccaattttctttttayacggtgaaatgaaaatagtgcacta

SEQ ID NO: 360 - DNA, 51 bp, Homo sapiens
ctgcatgtgagcattacgtttaagawcacaatgttgtagaagtatttcttg

SEQ ID NO: 361 - DNA, 51 bp, Homo sapiens
gtcagtgctatcctactggtactacrggcacgcctactgttactgtgagta

SEQ ID NO: 362 - DNA, 51 bp, Homo sapiens
tgagagagtgtagtatgggacttagyaccatgtttggcagatagcatggga

SEQ ID NO: 363 - DNA, 51 bp, Homo sapiens
cttgctaaaagcttcttggtgaacartaactctccaacacttggggcaact

SEQ ID NO: 364 - DNA, 51 bp, Homo sapiens
ccatggtcaatggtagtccatcacaytagataatatagtgtcagtgccaaa

SEQ ID NO: 365 - DNA, 51 bp, Homo sapiens
tccagtggacagtccgtttcttggamgtagctgagaattgaaggagcctga

SEQ ID NO: 366 - DNA, 51 bp, Homo sapiens
ttcttggaagtagctgagaattgaargagcctgaaagtttatgagagagga

SEQ ID NO: 367 - DNA, 51 bp, Homo sapiens
tgtaactgagatgaaggctgggaagkagagatccatggtgtagagtttata

SEQ ID NO: 368 - DNA, 51 bp, Homo sapiens
tttatttgcacttttcttgggaatakaatcaaatcttccctgccccccctt

SEQ ID NO: 369 - DNA, 51 bp, Homo sapiens
ataaatgctctgtcaagtgtatgaamatgaaactcttagcactatgcaaaa

SEQ ID NO: 370 - DNA, 51 bp, Homo sapiens
gaatgtttctgcacttcatctccaakaataagtctcatttgtcttgactaa

SEQ ID NO: 371 - DNA, 51 bp, Homo sapiens
cagggcttactgtgatgctgaggatygaaaacagaactaacagagatctag

SEQ ID NO: 372 - DNA, 51 bp, Homo sapiens
ttctcccgccatgaacccttaaacaytcttagtctgtaagagagaatgctc

SEQ ID NO: 373 - DNA, 51 bp, Homo sapiens
cccataaggaaaaacatgcaatacasatggctcaaatgaaagattttaagg

SEQ ID NO: 374 - DNA, 51 bp, Homo sapiens
aaagaaatgtttaaaaagatgaatasagcagttaatccttgggggaaaggg

SEQ ID NO: 375 - DNA, 51 bp, Homo sapiens
aagatgataatgaatacagaggacartaagtataagaggaaataggtgcaa

SEQ ID NO: 376 - DNA, 51 bp, Homo sapiens
agactttaacaagatgagggtgaatrgaaatgaagaactggagacatgttt

SEQ ID NO: 377 - DNA, 51 bp, Homo sapiens
gggtctaagttattttcccagggtargcaccagaatctgggttcgagtgat

SEQ ID NO: 378 - DNA, 51 bp, Homo sapiens
ggatttatgactaaatccaattatartccatttctcataccctaaaaatgg

SEQ ID NO: 379 - DNA, 51 bp, Homo sapiens
cagagtccatttttcctcctcctgawcctgaaactgtattcatcaggaaat

SEQ ID NO: 380 - DNA, 51 bp, Homo sapiens
ggaacaagctggctcacagattaaarcgacagtctccaaagagctttgtca

SEQ ID NO: 381 - DNA, 51 bp, Homo sapiens
cactgtgaaatgtagttctctagtamgttcttcagacttggctgcttctga

SEQ ID NO: 382 - DNA, 51 bp, Homo sapiens
catatggaactcataactggtcaacrtatccatcactccatttgtgatttg

SEQ ID NO: 383 - DNA, 51 bp, Homo sapiens
aaaggagaaataagaaatcaagccasggaaatgtgaaatggtgtagaaact

SEQ ID NO: 384 - DNA, 51 bp, Homo sapiens
gataatttgattcactctagagagamgatatgcaaaagagaattgcgtgga

SEQ ID NO: 385 - DNA, 51 bp, Homo sapiens
catgtgttaaaaacttaattctcacrgcaacagtgttgtgaagtggggtct

SEQ ID NO: 386 - DNA, 51 bp, Homo sapiens
tatctttgtacagtgctagtgaaaamaacatttagctgctgtggaaaactg

SEQ ID NO: 387 - DNA, 51 bp, Homo sapiens
ctgtgcagccactcagggttaaaccractggctcaagtgattctctagtga

SEQ ID NO: 388 - DNA, 51 bp, Homo sapiens
ggggatatattaggtcaggccctccrcaagtaatacagggtcttctcttaa

SEQ ID NO: 389 - DNA, 51 bp, Homo sapiens
gtcattttagtgaagttgttcagagrccattccatccccactgcagaggga

SEQ ID NO: 390 - DNA, 51 bp, Homo sapiens
tgctctggctgactcatttcatggamcttcctgttaaatttttgcctagtc

SEQ ID NO: 391 - DNA, 51 bp, Homo sapiens
gcaggaatgacttgcttaaggttgargatttttctctctcatacttacctt

SEQ ID NO: 392 - DNA, 51 bp, Homo sapiens
aagaaagggcagaagtgccagctaartagtaccttcaaattgacttactac

SEQ ID NO: 393 - DNA, 51 bp, Homo sapiens
tgacctgtctacctaaggctctgacycataaccgttttttatgctctaatc

SEQ ID NO: 394 - DNA, 51 bp, Homo sapiens
tatgtgcatagctttcaaatctaacrctggtagcaatcaaacaagttaagt

SEQ ID NO: 395 - DNA, 51 bp, Homo sapiens
tcaacactggaaacacttatccaatraaaccttctttatataccaatctct

SEQ ID NO: 396 - DNA, 51 bp, Homo sapiens
aaaaaaaaaagccacacagttttgawtaatgagcccagtaataaatcatta

SEQ ID NO: 397 - DNA, 51 bp, Homo sapiens
ggtggatcaagtggtcttggacaacygatttaccttctctcaatctaagtg

SEQ ID NO: 398 - DNA, 51 bp, Homo sapiens
tgaattggccagtccattctttggaracctgaggatcaatacaaattcttc

SEQ ID NO: 399 - DNA, 51 bp, Homo sapiens
ggtaatgttcttttattaataaagcraggaagcatccaggaaattgcctaa

SEQ ID NO: 400 - DNA, 51 bp, Homo sapiens
cccggctcagactggatgacgacgayggccagtggcaacttctctcctaat

SEQ ID NO: 401 - DNA, 51 bp, Homo sapiens
catagagccagagataagtgaagtcrgaaatatcgaaaaggggccatgagt

SEQ ID NO: 402 - DNA, 51 bp, Homo sapiens
tttgccagatgaaggtaataaataaygcttattgaatacttagctgcatta

SEQ ID NO: 403 - DNA, 51 bp, Homo sapiens
catttcatcctccgtatgttcgtgtraagtcagttctttgttatccatcct

SEQ ID NO: 404 - DNA, 51 bp, Homo sapiens
catgcagggctaggctctgctgcatrtaacaagcctgtcattcagaaacca

SEQ ID NO: 405 - DNA, 51 bp, Homo sapiens
ttttatatggtaggcactaatgaagkagtccacaaacactggttacatagc

SEQ ID NO: 406 - DNA, 51 bp, Homo sapiens
ctgccttgtgtactgactctaaaacygtggatttgccaaacacaatctctg

SEQ ID NO: 407 - DNA, 51 bp, Homo sapiens
ctcatatttgatggagggaataaaaygtcaaagaatatgtgaaaggtatag

SEQ ID NO: 408 - DNA, 51 bp, Homo sapiens
caaaatgacagttgaatttttctccygtaatgcataatcaggtcaggccag

SEQ ID NO: 409 - DNA, 51 bp, Homo sapiens
gagtaagtctatagagtacaaatgayacatagctataattgacactgtaat

SEQ ID NO: 410 - DNA, 51 bp, Homo sapiens
gcatttgtcaagcaatgaaaaagcamaattaccttgaatggagccctggat

SEQ ID NO: 411 - DNA, 51 bp, Homo sapiens
gctaacaataattaagttgcttagayaattccaggtgactcaaatttcata

SEQ ID NO: 412 - DNA, 51 bp, Homo sapiens
cataaaaaattagattgtatttggaygacatgtttgtataaccctttggac

SEQ ID NO: 413 - DNA, 51 bp, Homo sapiens
ggtaaataccaaggagtaaaaggaawcattgttgacatgtgttttcctttg

SEQ ID NO: 414 - DNA, 51 bp, Homo sapiens
gggccatcagaattggaaggccaaastaattcctctatgcactgtatttaa

SEQ ID NO: 415 - DNA, 51 bp, Homo sapiens
ctttcacaaacattgtctcattttgwacttcctcatagtcttgtgaagtag

SEQ ID NO: 416 - DNA, 51 bp, Homo sapiens
ggagcataagagaaaagccatcgackattgtaggtcaaaatagtcttgcac

SEQ ID NO: 417 - DNA, 51 bp, Homo sapiens
ccttgtactttcacacttttacttaraaccctgtccaatggccatgtgaaa

SEQ ID NO: 418 - DNA, 51 bp, Homo sapiens
caaggtcatacagccagtcagcaacraagcttggatttgaactcaacattt

SEQ ID NO: 419 - DNA, 51 bp, Homo sapiens
ttgttatgaggattaaatttgatgaygcatataaagtattaggcttactgt

SEQ ID NO: 420 - DNA, 51 bp, Homo sapiens
tgtccaaactggaggtcaggacgtarattatgaagcctccactaacagttc

SEQ ID NO: 421 - DNA, 51 bp, Homo sapiens
ccttgcaaatagagatattttactarcctttgaacacgtttcaccagtcca

SEQ ID NO: 422 - DNA, 51 bp, Homo sapiens
tgcttttttctaccttttgccaaacracaaaatctatgataagccatctag

SEQ ID NO: 423 - DNA, 51 bp, Homo sapiens
tggtcagaaggaaagtttatgcctgraagattactgtgaccctcaggtaac

SEQ ID NO: 424 - DNA, 51 bp, Homo sapiens
tctgagcatcagacaccacttttaartaacagcaatattaatactgcctac

SEQ ID NO: 425 - DNA, 51 bp, Homo sapiens
gtactttacaagtgtgcaagaatcayggtgttactgggcttggggtgcccc

SEQ ID NO: 426 - DNA, 51 bp, Homo sapiens
atcaaatcaacttcatagttaacaaytgctttcaaggaatgcccttttacc

SEQ ID NO: 427 - DNA, 51 bp, Homo sapiens
gatcaaaacaatgaaagcacagaatsaatcaaaataaatgtttcattgaag

SEQ ID NO: 428 - DNA, 51 bp, Homo sapiens
tctgtagtttctcattttagaatacytcatgagattgaaaaactgaaatcc

SEQ ID NO: 429 - DNA, 51 bp, Homo sapiens
ggggccagaacaatgacaatgataartaacaaatgactgtatgaaagctaa

SEQ ID NO: 430 - DNA, 51 bp, Homo sapiens
gaagatcatctcaggtttggtaatgyaatgccctggtaatgagaaacaatg

SEQ ID NO: 431 - DNA, 51 bp, Homo sapiens
tggtttttatgaattagttgaaagarcataaatcaagtcttgaagaggagg

SEQ ID NO: 432 - DNA, 51 bp, Homo sapiens
actgtaacctatgcttcactaaacamaacacttatggtctaatttagattg

SEQ ID NO: 433 - DNA, 51 bp, Homo sapiens
ttacatacctgtatctttatatatcraaatgttgacgcatagctataaaca

SEQ ID NO: 434 - DNA, 51 bp, Homo sapiens
agtaatgttaatttatggagtatgcrctatctgacaaaacatttgctaagt

SEQ ID NO: 435 - DNA, 51 bp, Homo sapiens
aacagaaaagcatcaaatcacgtatkaaggaaccctcattagactgacagc

SEQ ID NO: 436 - DNA, 51 bp, Homo sapiens
aatttacctcacagcctaagaagtamggagttgcattaaaaattcagaatg

SEQ ID NO: 437 - DNA, 51 bp, Homo sapiens
tcttgtctgaatctgagttgataaaragtttcttcaagttggctcctgagt

SEQ ID NO: 438 - DNA, 51 bp, Homo sapiens
tttatctctgttttagatacttacasaacataacaaccaaattatctattc

SEQ ID NO: 439 - DNA, 51 bp, Homo sapiens
ctgttcagttcttggaaacacatgcyctttggaaaaatacctaaagagatg

SEQ ID NO: 440 - DNA, 51 bp, Homo sapiens
agcacaggcaacaaaattaaaatacrcaggtaagactatattaaactaaaa

SEQ ID NO: 441 - DNA, 51 bp, Homo sapiens
gtgataatgtcaaggtttactcttaygtgaaaggctttaacccccacacaa

SEQ ID NO: 442 - DNA, 51 bp, Homo sapiens
tttgtgcccacataattacatgccartacctttcctcaaattagaaattat

SEQ ID NO: 443 - DNA, 51 bp, Homo sapiens
gtatgattgtcctaatgaccaatgayatgaattactgaaaacctaattagg

SEQ ID NO: 444 - DNA, 51 bp, Homo sapiens
cactaaatggagacacgaatctaaargatcaccggcaacagccctaaaaga

SEQ ID NO: 445 - DNA, 51 bp, Homo sapiens
cttcagtagttactttccatttgagwtacagctctggattgttccttgtcc

SEQ ID NO: 446 - DNA, 51 bp, Homo sapiens
ctgaatcttgaaagatgagtgtaaaycctttggagattagtggcaggtagt

SEQ ID NO: 447 - DNA, 51 bp, Homo sapiens
actggatttttagcagtttatttccracttttttgcatatggcttcaggag

SEQ ID NO: 448 - DNA, 51 bp, Homo sapiens
aacattaatggaagggggtcagaaayatttggatggaatgagttactgcag

SEQ ID NO: 449 - DNA, 51 bp, Homo sapiens
atgagcttaacaattcctatctgtawctgtagtggcaaatgcagtagcatc

SEQ ID NO: 450 - DNA, 51 bp, Homo sapiens
taagagaagagctgtggtaataagcyatagagcaatgtaagtttttggtag

SEQ ID NO: 451 - DNA, 51 bp, Homo sapiens
cacagctcttctcttagatcagtaamtcaccttctctcatccattttattc

SEQ ID NO: 452 - DNA, 51 bp, Homo sapiens
tcacttaattttaagtagaagaatargaacatactaagacaatattcttgg

SEQ ID NO: 453 - DNA, 51 bp, Homo sapiens
gtctgctcagggatgtgaaaggagawgagttaattattcctatgtttctag

SEQ ID NO: 454 - DNA, 51 bp, Homo sapiens
gcacacacacctcaagaacgcttcaycgggcttcaacattgtatagcctta

SEQ ID NO: 455 - DNA, 51 bp, Homo sapiens
gtctgagctatgctgtctgaactgayactgggtttggtttccagtcattta

SEQ ID NO: 456 - DNA, 51 bp, Homo sapiens
taagaaaaaagtacttagggtacatragagatacataaagtgctttgggaa

SEQ ID NO: 457 - DNA, 51 bp, Homo sapiens
gcaaaatacatactctagcacacaaytaatgcttgataaataatagctctt

SEQ ID NO: 458 - DNA, 51 bp, Homo sapiens
tctcatccactaacttgattttctcrctggatgtttcattttgggaatcta

SEQ ID NO: 459 - DNA, 51 bp, Homo sapiens
cctaaagatttgtttgtagctcgacmacttccctcctacaaacaaagcaaa

SEQ ID NO: 460 - DNA, 51 bp, Homo sapiens
gactcaacctaaggtgaggtgaaagyatgctggcaagatgggtccaggaaa

SEQ ID NO: 461 - DNA, 51 bp, Homo sapiens
gtgctctaaacctcctggggtattcyacagctttaatgactatgtgtaaca

SEQ ID NO: 462 - DNA, 51 bp, Homo sapiens
gacaaggtgataagttagggaagaamgtagctaatagcaccaaataaggat

SEQ ID NO: 463 - DNA, 51 bp, Homo sapiens
gtgacccagcatccagactgcttccrttctgaggcttggccatctcaacac

SEQ ID NO: 464 - DNA, 51 bp, Homo sapiens
agccactatttctttaattattttawgccttctcccatcttttttctttct

SEQ ID NO: 465 - DNA, 51 bp, Homo sapiens
ccccaatatcctttctaatcacatamaagctggtttggaaggttgatgggt

SEQ ID NO: 466 - DNA, 51 bp, Homo sapiens
aaggaaaggacttggtccttgaaacmtttatcttctgctcaccaaagagcc

SEQ ID NO: 467 - DNA, 51 bp, Homo sapiens
aaactgcagcacatccctgacaaaamcttagccaatgtgaaggggagctct

SEQ ID NO: 468 - DNA, 51 bp, Homo sapiens
aaaccatcttccataagttagaaccrcttgatttcaagtaacagaacccca

SEQ ID NO: 469 - DNA, 51 bp, Homo sapiens
gcctctttataatgtgaaacctgtcraacatcaatcggcagaaacacctta

SEQ ID NO: 470 - DNA, 51 bp, Homo sapiens
gccaactttaataagtatagccacckcctgggtgtagactcctgcaaaata

SEQ ID NO: 471 - DNA, 51 bp, Homo sapiens
gcatgacacagagagcaaaactgtasacgctggtcatgttttcctctattt

SEQ ID NO: 472 - DNA, 51 bp, Homo sapiens
ttgccctgtattatacacaaagtcaygcgggaatcattttatttggggagg

SEQ ID NO: 473 - DNA, 51 bp, Homo sapiens
aagaagcagagagaaaggagccacartcatagaattctgaaacttggaagg

SEQ ID NO: 474 - DNA, 51 bp, Homo sapiens
gtttgtataccagttctggggatcaygggccttgtgaaaacttatcccaag

SEQ ID NO: 475 - DNA, 51 bp, Homo sapiens
tatctatctccactaaaataacagcyattcatttgttgatctgtcttgctt

SEQ ID NO: 476 - DNA, 51 bp, Homo sapiens
aatctgccctaccttttaccctgtargctctgcagacatctcccgtggccc

SEQ ID NO: 477 - DNA, 51 bp, Homo sapiens
agaaatgatttaaaattgtaaatcaygtagcaagttcaatagggtttagtg

SEQ ID NO: 478 - DNA, 51 bp, Homo sapiens
aaaatgctgctaccctttgacaagayggtttcatttctagaaatctaagtg

SEQ ID NO: 479 - DNA, 51 bp, Homo sapiens
agtgactcctgcacccgatatcaaakaatccaaaatatcaagtgaattgtt

SEQ ID NO: 480 - DNA, 51 bp, Homo sapiens
tctctttctagggaggatggaaatakcaaacaaacaacaatgcaactttga

SEQ ID NO: 481 - DNA, 51 bp, Homo sapiens
tcaggaggcagagaaagcacagtgcmtttgagtaactgaaattgatttgca

SEQ ID NO: 482 - DNA, 51 bp, Homo sapiens
atgtaattattaattttttgcaatayactttgaaagaaaaaattcataatt

SEQ ID NO: 483 - DNA, 51 bp, Homo sapiens
gtatttcgtatcacttcaaatgaaastgtcatctaccctgttcaagccaga

SEQ ID NO: 484 - DNA, 51 bp, Homo sapiens
ggaaataaatgtttcaaaagtgctargaatataaatatccagatatttaag

SEQ ID NO: 485 - DNA, 51 bp, Homo sapiens
gatctttgcttattttcacataatawatccaaatgtatgtaatattatgcc

SEQ ID NO: 486 - DNA, 51 bp, Homo sapiens
acaaaaagtttactgttgtcaattamattagctaaatatgagtcaagtcca

SEQ ID NO: 487 - DNA, 51 bp, Homo sapiens
tgaccttcagcaggagagttaatgamtactcatgggtccaaacccttccac

SEQ ID NO: 488 - DNA, 51 bp, Homo sapiens
tttaacaaacagagctccaaatccastaacttttacaccagatatggtcct

SEQ ID NO: 489 - DNA, 51 bp, Homo sapiens
tttttttttttttttggtattccttwaagatcagcattggcatcttcccac

SEQ ID NO: 490 - DNA, 51 bp, Homo sapiens
agtggataagaagagtctccttttasagcaggttgatggaaagtgctaatt

SEQ ID NO: 491 - DNA, 51 bp, Homo sapiens
tttcggaaaatagagaaacatctaaktgtggcactttacaagttcatatta

SEQ ID NO: 492 - DNA, 51 bp, Homo sapiens
tatttttagtttctgctattcataaraaaataagaaaaatactaacttccc

SEQ ID NO: 493 - DNA, 51 bp, Homo sapiens
agcaggttagagcattttgaggagtyaatattaatgtgttgctgtgagcct

SEQ ID NO: 494 - DNA, 51 bp, Homo sapiens
aagcttaacatatctggctggaatcrctgatactgaacaaaacaactgaag

SEQ ID NO: 495 - DNA, 51 bp, Homo sapiens
tagaaaaacattgaaaaattatgackgattagatgcatgtttcactctttt

SEQ ID NO: 496 - DNA, 51 bp, Homo sapiens
accggggttggaaactggtagcctayggactatatcaggattcaaaactca

SEQ ID NO: 497 - DNA, 51 bp, Homo sapiens
ctttcaatgtcacagcagaaaacacygagaataactggaattttatgcttc

SEQ ID NO: 498 - DNA, 51 bp, Homo sapiens
caagtcttgtctaagatgtctgaacyattaaatttaccattttgtttttct

SEQ ID NO: 499 - DNA, 51 bp, Homo sapiens
tgctttgatgcgggctcgtttctcaygttccagtctagaataaaaaaagcg

SEQ ID NO: 500 - DNA, 51 bp, Homo sapiens
ttcagggcggatgaaactctcctacmaagaagggccaaaccggccgcagcc

SEQ ID NO: 501 - DNA, 51 bp, Homo sapiens
catttgcaattcttggggtctgtaayggccacgtgagtgatgaagaaacac

SEQ ID NO: 502 - DNA, 51 bp, Homo sapiens
tctcaataattgttggactataaaamatcaatattatgctagatcccaacc

SEQ ID NO: 503 - DNA, 51 bp, Homo sapiens
atcagaattctttggtgaaatgttasaaaatatagaccacttctctctgca

SEQ ID NO: 504 - DNA, 51 bp, Homo sapiens
tatcaatgaagcctttataaataccwatatcttatgtcttattattttcac

SEQ ID NO: 505 - DNA, 51 bp, Homo sapiens
tcttatttttggaatgacacatctaygttacttgatgactacaaatagata

SEQ ID NO: 506 - DNA, 51 bp, Homo sapiens
ttctaaagttggtgcaccattttccrcactcctaataattactaataattg

SEQ ID NO: 507 - DNA, 51 bp, Homo sapiens
ttatttgtgcatgtaaaacatacacmgcaatgttaaaggtattgaggattc

SEQ ID NO: 508 - DNA, 51 bp, Homo sapiens
cctattcacttctgtaaaatgaacarcttacttttcccaataactcaatgt

SEQ ID NO: 509 - DNA, 51 bp, Homo sapiens
attaaatcagtctgcattagggaacrctttcgtcaggttgaaccagagaga

SEQ ID NO: 510 - DNA, 51 bp, Homo sapiens
cacacgtctgtgtatgcttaaccggmgttctcaccattcaaatcaaatgta

SEQ ID NO: 511 - DNA, 51 bp, Homo sapiens
aaatattggagagattttcatttctyacaccctttattgtcaccattttag

SEQ ID NO: 512 - DNA, 51 bp, Homo sapiens
aatagcacaaagtctcactgtaacartctccagagtcggttgggaatggag

SEQ ID NO: 513 - DNA, 51 bp, Homo sapiens
gtttttaaataatagatttgcatcawgacttgtatatctggacaaactgca

SEQ ID NO: 514 - DNA, 51 bp, Homo sapiens
agttatatgtagacaatgcaaaagargtaggacagccttgatgtgtggtaa

SEQ ID NO: 515 - DNA, 51 bp, Homo sapiens
ttggtataacttcttttcctatttcsaccattgtcatacttttttactaat

SEQ ID NO: 516 - DNA, 51 bp, Homo sapiens
ttcagtacgtagaaagttgttgaagkacaataagggtataagaatacaaaa

SEQ ID NO: 517 - DNA, 51 bp, Homo sapiens
agataggggaacagaggataatggamaggaaacatcagtgctcacatgttg

SEQ ID NO: 518 - DNA, 51 bp, Homo sapiens
atcctatttacgtaatcatcaagcaktatttgtaactgaatatattttact

SEQ ID NO: 519 - DNA, 51 bp, Homo sapiens
cattgcttagatgattttcctggacsatccaagccaaatcagtgctggcta

SEQ ID NO: 520 - DNA, 51 bp, Homo sapiens
ccaacaagccaggtataccatgttasgtggactgagttacaggtcaggagt

SEQ ID NO: 521 - DNA, 51 bp, Homo sapiens
tagttttctatgctctggaaacaaaygtcttgatttagaaacctaaaaaaa

SEQ ID NO: 522 - DNA, 51 bp, Homo sapiens
gccaattctggtttgatgttgacaaygtatttattagctattgtgaggatt

SEQ ID NO: 523 - DNA, 51 bp, Homo sapiens
tgtaagcttactcatcttctttttayggtctttaagatcagaccaatggtg

SEQ ID NO: 524 - DNA, 51 bp, Homo sapiens
gattgatttgaagttgataaaaaaawttgggagtcagtagatttctaatga

SEQ ID NO: 525 - DNA, 51 bp, Homo sapiens
gtagaagaacagtatctctctaaccyaaacgttttgctagaaacactgcca

SEQ ID NO: 526 - DNA, 51 bp, Homo sapiens
attttagattttttacttttcagcaygtgacttaaagttctgttgacttgg

SEQ ID NO: 527 - DNA, 51 bp, Homo sapiens
gaaaagcatattactaattaatggartagaaccaggtaggaatttcttgga

SEQ ID NO: 528 - DNA, 51 bp, Homo sapiens
gaagacaataattaagttttccctgragaactaggctcatttgttataccc

SEQ ID NO: 529 - DNA, 51 bp, Homo sapiens
atgccagtccatttcatgctcaaagraatctcatttactcccacagcagct

SEQ ID NO: 530 - DNA, 51 bp, Homo sapiens
ggaaaggtcataatagacactcactkaattgattttttctagttttatggt

SEQ ID NO: 531 - DNA, 51 bp, Homo sapiens
agacaggagcacgtaagagggagatyacaacacagtgtgagaagtacaaag

SEQ ID NO: 532 - DNA, 51 bp, Homo sapiens
ggattcaatcaggtgggaacctgaamgtctgtgacatctgaagtgtgtagt

SEQ ID NO: 533 - DNA, 51 bp, Homo sapiens
agaggcccagttctttccaaaaggcycagtgtacatggttaagaagctttt

SEQ ID NO: 534 - DNA, 51 bp, Homo sapiens
tttgaaaactcaccattatgttacasagttcaaagaacaaaccccaaatta

SEQ ID NO: 535 - DNA, 51 bp, Homo sapiens
ttttctctgccatcttttaacatcaygttagtttttctgagtttgagtcag

SEQ ID NO: 536 - DNA, 51 bp, Homo sapiens
gttacagaaaattaattcaaccatasgtattaacaccatagtaatttggac

SEQ ID NO: 537 - DNA, 51 bp, Homo sapiens
atatctaataatacagagcactatcwctaacctcaacagttgacattttaa

SEQ ID NO: 538 - DNA, 51 bp, Homo sapiens
ttcctgtttttccttatcagtcaaayttccctgttgtgtgttaccatagca

SEQ ID NO: 539 - DNA, 51 bp, Homo sapiens
aacaaaaacttctaaacaagacctaygaggctctacatggacttgtctttc

SEQ ID NO: 540 - DNA, 51 bp, Homo sapiens
agagccagaaccatttccaaaaaaakgctaatcatgtcagatctctctctg

SEQ ID NO: 541 - DNA, 51 bp, Homo sapiens
caaattctatcaatactggatgagaygccatatttgggatgagtgcagcaa

SEQ ID NO: 542 - DNA, 51 bp, Homo sapiens
caagccaggactgacattcatatttyttaaactagcctgacacaatttgca

SEQ ID NO: 543 - DNA, 51 bp, Homo sapiens
caaaacccagagtttaactatttctrtttagccaaccataaaacttacgtg

SEQ ID NO: 544 - DNA, 51 bp, Homo sapiens
tgacaacatatcagaaaaatatagarggaaactgaaggaagtcccaatgaa

SEQ ID NO: 545 - DNA, 51 bp, Homo sapiens
aggcatatacccaatagcaaataaaygaaaattgatgcaatgctacaaaaa

SEQ ID NO: 546 - DNA, 51 bp, Homo sapiens
aggtcagaagagttagaaagagcaaytgaatatgttggtgccattaatgga

SEQ ID NO: 547 - DNA, 51 bp, Homo sapiens
acaatttcatacaattaaattaaccmgctcaaggtcactataattacagag

SEQ ID NO: 548 - DNA, 51 bp, Homo sapiens
ttacctcactagaacatctgcttggrattcagcctgttgctactgatcatt

SEQ ID NO: 549 - DNA, 51 bp, Homo sapiens
atcagtttcctattacttctgtaacmaattgccagaaacttagaggcttaa

SEQ ID NO: 550 - DNA, 51 bp, Homo sapiens
gtcacggcaataaagcctaggtcaaragaacagaaagctcaatggatatgc

SEQ ID NO: 551 - DNA, 51 bp, Homo sapiens
gagtgactttttttgtataccattaygttgctaactgacaagtcctatgac

SEQ ID NO: 552 - DNA, 51 bp, Homo sapiens
agaaagatggtttcaaagtacaagcmatggaaggtacgtagggcatgtggc

SEQ ID NO: 553 - DNA, 51 bp, Homo sapiens
gattggagaattatgagcaaatacarggatgtgattttaagccatttaatg

SEQ ID NO: 554 - DNA, 51 bp, Homo sapiens
tccagaactcaacgaacaatgtcaartaacaatgatgatagaagaatcaga

SEQ ID NO: 555 - DNA, 51 bp, Homo sapiens
tgtcttggaaatgtttagatgtagasagagaaataaacaaagtcacaaggt

SEQ ID NO: 556 - DNA, 51 bp, Homo sapiens
taaaatattatttgattcatgggaawtattacttgccatttaaaatattac

SEQ ID NO: 557 - DNA, 51 bp, Homo sapiens
attaaatgtttttgtttgatatcgtraactgatttatcctttttctttaga

SEQ ID NO: 558 - DNA, 51 bp, Homo sapiens
cagagattctcatgtgagaattgccygaatatctgctttaatgaatccaaa

SEQ ID NO: 559 - DNA, 51 bp, Homo sapiens
acatgtgagtagactgtctgaccaaytatgatgttagtttatttgagctgc

SEQ ID NO: 560 - DNA, 51 bp, Homo sapiens
catgcccttcacttacttattttacygctggttccaacagtcagccctatt

SEQ ID NO: 561 - DNA, 51 bp, Homo sapiens
aaactgactgcttttgcagcttctcrcatggatacccttcatgtccttcag

SEQ ID NO: 562 - DNA, 51 bp, Homo sapiens
gattttctaaatgaatactcctctamctatgcataacatgtgtcatttaat

SEQ ID NO: 563 - DNA, 51 bp, Homo sapiens
agcaactccgttcctgatttctaaamctaccctactttgttgatgccattc

SEQ ID NO: 564 - DNA, 51 bp, Homo sapiens
aaatatgagcaaaaattggattagcraagagggaaaaaattgtatctcaag

SEQ ID NO: 565 - DNA, 51 bp, Homo sapiens
ttcttggcaaagtattaccttgtacrctttgaagatcgttgtctttcatat

SEQ ID NO: 566 - DNA, 51 bp, Homo sapiens
atctgacatttccctacctgtataaytaatctagtgagtggtctacttagc

SEQ ID NO: 567 - DNA, 51 bp, Homo sapiens
ttttgaacaaaaaagaaacagaaagsaatggacttaatctgtttttctcaa

SEQ ID NO: 568 - DNA, 51 bp, Homo sapiens
gctcagaagaagtaatgtctcctacyagaattcgaaagaaagtctctacta

SEQ ID NO: 569 - DNA, 51 bp, Homo sapiens
gggcatatgaatcccaactcagagayaccaaggtgcaaagtcagagagaaa

SEQ ID NO: 570 - DNA, 51 bp, Homo sapiens
taaaatgacatgttgtgggagtacayagaaaactgttatgtttgggtgtta

SEQ ID NO: 571 - DNA, 51 bp, Homo sapiens
tggaaatcatagttaagttagataaygtaatcatagataagaaatcatagt

SEQ ID NO: 572 - DNA, 51 bp, Homo sapiens
tctgggatggcaatgtgacataggasaggaccatgtgaaaagtctctggtc

SEQ ID NO: 573 - DNA, 51 bp, Homo sapiens
accacagtccagatttctcacagtaycttttgttcattttactgctcctta

SEQ ID NO: 574 - DNA, 51 bp, Homo sapiens
tgacatttttatgtactcacgataasaaggtgaatgaaaaatgtacttttt

SEQ ID NO: 575 - DNA, 51 bp, Homo sapiens
aatattgatcaacttgactcacagawattattaatgtaatcacacaagacc

SEQ ID NO: 576 - DNA, 51 bp, Homo sapiens
tccggtttcacagttgtcaaaagtayctgaaattgacaaacattgtaaact

SEQ ID NO: 577 - DNA, 51 bp, Homo sapiens
ttactgggagggcttgataaaacacmgacttctacttcattgagtatctga

SEQ ID NO: 578 - DNA, 51 bp, Homo sapiens
ttgtttcctgccaatgcctcctacasattgaacccagtggcaaccagaggg

SEQ ID NO: 579 - DNA, 51 bp, Homo sapiens
ctgctggagcataggcagcagcacgratgacaagaagtggatatttttccc

SEQ ID NO: 580 - DNA, 51 bp, Homo sapiens
taacatcttcaaaaccaacgagatayaaaaagcaacaggagtctataggtc

SEQ ID NO: 581 - DNA, 51 bp, Homo sapiens
ttttaaattacaagtctaaggacaamatatgaatgagtaccagcatcaagg

SEQ ID NO: 582 - DNA, 51 bp, Homo sapiens
gtggtacttgggttttgattttgatyagagaaaattagaacaggtaatatt

SEQ ID NO: 583 - DNA, 51 bp, Homo sapiens
aggagaaactttggttatagaatgaygactgctgtaatttaaacaatgaaa

SEQ ID NO: 584 - DNA, 51 bp, Homo sapiens
tcatttatttcttattttcataaaascatatgaccaaatatatgcctgatt

SEQ ID NO: 585 - DNA, 51 bp, Homo sapiens
acagatttcttattttttactggcawtatagttgggtctctggaatattac

SEQ ID NO: 586 - DNA, 51 bp, Homo sapiens
aaattcttgtttaaaaccagtggtasatctcagcaaactgggtggagactg

SEQ ID NO: 587 - DNA, 51 bp, Homo sapiens
tttttttttctgttatggaattcagyatctttcatgtagattaacatcacc

SEQ ID NO: 588 - DNA, 51 bp, Homo sapiens
cactcagtgcagtgactcttggcccrcattctgtagataagaaacaccttt

SEQ ID NO: 589 - DNA, 51 bp, Homo sapiens
aattaagtaatttggatactgaaagscttatttgttccaaaacttaagtag

SEQ ID NO: 590 - DNA, 51 bp, Homo sapiens
tttgccatattttgatagtggttaaygcaaattttcctagattattcttcc

SEQ ID NO: 591 - DNA, 51 bp, Homo sapiens
agagcatgcttttgcactctgacaaytaagtaattcccaaaatgtccatgt

SEQ ID NO: 592 - DNA, 51 bp, Homo sapiens
ttgtttccctatctttatggttttasgccaaaagacttgaaataatttttt

SEQ ID NO: 593 - DNA, 51 bp, Homo sapiens
cagctaaaacctgaacaacgacaaastgaaaggactctgaccctccggcaa

SEQ ID NO: 594 - DNA, 51 bp, Homo sapiens
aaaatttttggtttactgttagcaaytctcatggccttttgcagtttccaa

SEQ ID NO: 595 - DNA, 51 bp, Homo sapiens
ggcacagtaagataagtgagggtgaygtaatggaaggaactggagtctgac

SEQ ID NO: 596 - DNA, 51 bp, Homo sapiens
gagttctattaatctggcaggtaatkaagcaatttaaaagaggtcatattg

SEQ ID NO: 597 - DNA, 51 bp, Homo sapiens
acaaacattctttacctagtaagcaktgattgaagttcttacctagggtaa

SEQ ID NO: 598 - DNA, 51 bp, Homo sapiens
aaaagagagagaatgagagagattaygtaattgtatatattgggtattttt

SEQ ID NO: 599 - DNA, 51 bp, Homo sapiens
agaacaatggtatacctgttgttgaygaaaattagctattatgatttcttt

SEQ ID NO: 600 - DNA, 51 bp, Homo sapiens
taataaagatctgaaattaataaacrcttgaactgagtggagaatggaagt

SEQ ID NO: 601 - DNA, 51 bp, Homo sapiens
aaaacctcacaggctaaggataaagscctcattttgctgttagttgattaa

SEQ ID NO: 602 - DNA, 51 bp, Homo sapiens
acttaaaatggctaatgatatcttayctgttcagcaaactgtgaaccaatt

SEQ ID NO: 603 - DNA, 51 bp, Homo sapiens
actcatcctctcattgacgctaatarcagtacttactctaatgaccataac

SEQ ID NO: 604 - DNA, 51 bp, Homo sapiens
ctaatgaccataacaggcttagcacratacacaaggaagtgattggtagtt

SEQ ID NO: 605 - DNA, 51 bp, Homo sapiens
gcacttggatggtcgaatttttagcyctatgtcacaactgactagacatta

SEQ ID NO: 606 - DNA, 51 bp, Homo sapiens
tgttttgggaacattagaccaattarcattactatcaatagaagttgctat

SEQ ID NO: 607 - DNA, 51 bp, Homo sapiens
aagtggaattgtgattgatttttaargtaaatagtagttctatattcaact

SEQ ID NO: 608 - DNA, 51 bp, Homo sapiens
tattattttaaaacatacaataaaargaacatgtaaaagtattttttttat

SEQ ID NO: 609 - DNA, 51 bp, Homo sapiens
ccagaaggggaggagtcacatataargaagcgaaaaacagaaattccattt

SEQ ID NO: 610 - DNA, 51 bp, Homo sapiens
tggcttaccaacattaagttaaacamcatgtaagggttagaaatatgaatc

SEQ ID NO: 611 - DNA, 51 bp, Homo sapiens
ttaattgaattgggataaacaagaaragagttatctagacttataaaaaca

SEQ ID NO: 612 - DNA, 51 bp, Homo sapiens
tatcaaaagaagaatgagtataaaartggaatatgacaaaatacttaaagt

SEQ ID NO: 613 - DNA, 51 bp, Homo sapiens
tcctctttcttaaaaatcaaaagaartggttgagagcttattgagttgaat

SEQ ID NO: 614 - DNA, 51 bp, Homo sapiens
agaaagtcttcaagacttttgattaygtaaagatttccttagctatgatac

SEQ ID NO: 615 - DNA, 51 bp, Homo sapiens
gcagactttttctgggtagaagtatwacttgaaagaggcagctcccatctg

SEQ ID NO: 616 - DNA, 51 bp, Homo sapiens
aaagcatagacagcaatatctgccarccatatttattaagattgaatgcac

SEQ ID NO: 617 - DNA, 51 bp, Homo sapiens
catttttttaaaaagataataaagargagaatggaaaatatgagtgtactg

SEQ ID NO: 618 - DNA, 51 bp, Homo sapiens
aaatgacaagccatggagtataaaargaaacctgcaatactcagaatatat

SEQ ID NO: 619 - DNA, 51 bp, Homo sapiens
aagctgtttatagctataatctgaasgattcactatagcagaagataactt

SEQ ID NO: 620 - DNA, 51 bp, Homo sapiens
accctgaattgctctgcagtttgaargagagtctgatatctgaaccaacac

SEQ ID NO: 621 - DNA, 51 bp, Homo sapiens
atggggaattagactctgatgcatayggaattgtgactctctaataaacat

SEQ ID NO: 622 - DNA, 51 bp, Homo sapiens
attttaaaaaatttttgtatgtttargaggtacaagtgcagatatctgaca

SEQ ID NO: 623 - DNA, 51 bp, Homo sapiens
tctcacactcagtaatgcttcaagaycatttaatctgctgaattaagctcc

SEQ ID NO: 624 - DNA, 51 bp, Homo sapiens
tggggagtcccagtggcttccaacaycgtttggacaaaatgtagtgggagt

SEQ ID NO: 625 - DNA, 51 bp, Homo sapiens
tgttttaatagttagtttattatcartcttttcctacataaactatgaact

SEQ ID NO: 626 - DNA, 51 bp, Homo sapiens
gattctcccaagtagttcacaaaagwatgtatttttaattcaatctttttg

SEQ ID NO: 627 - DNA, 51 bp, Homo sapiens
tgggagagagtgattatttcaactcycttatatagcaagtcacccaaacat

SEQ ID NO: 628 - DNA, 51 bp, Homo sapiens
aaactggttagaatatgcaaaatackccttgacttggattttcacatttcc

SEQ ID NO: 629 - DNA, 51 bp, Homo sapiens
acaatctcattttagtgtggtgaccracatgtaaaaacatgaccaaagaac

SEQ ID NO: 630 - DNA, 51 bp, Homo sapiens
gtgcaggacagagatgggagacaaamtttcttgagtggcagctctgtgcaa

SEQ ID NO: 631 - DNA, 51 bp, Homo sapiens
atcgcacacaaagctgtttgaattaygggtatttctttttgctcacaattg

SEQ ID NO: 632 - DNA, 51 bp, Homo sapiens
gtaatttttctagcagggctgaatgkataggatgttcacgagcatattttg

SEQ ID NO: 633 - DNA, 51 bp, Homo sapiens
tctgcttggaaataggagaatagtgraacaaattaaaggaaaatgagacag

SEQ ID NO: 634 - DNA, 51 bp, Homo sapiens
gacctacaagcagacaagtcttagaygacgccagagggtaaatgtgatact

SEQ ID NO: 635 - DNA, 51 bp, Homo sapiens
tagtctccagcactgtcagaaatagscattctacccaaaagtcatcacagt

SEQ ID NO: 636 - DNA, 51 bp, Homo sapiens
acttgctgagcttttaaccgagacayagaaattaggtaaagatattaagta

SEQ ID NO: 637 - DNA, 51 bp, Homo sapiens
actaaagaaacaatggtaagtgtaakgttgatgttaatttaggaaaatacc

SEQ ID NO: 638 - DNA, 51 bp, Homo sapiens
agataatgaagaacatttgcaacackcagcaaggtgcctgggtaattgtac

SEQ ID NO: 639 - DNA, 51 bp, Homo sapiens
agtcctctggatttggtcagaagatraaggaaaatagtagagaaaagggaa

SEQ ID NO: 640 - DNA, 51 bp, Homo sapiens
tgctcctgagtgacatcaccaagacrggtcagtcccattccagtgcgcctc

SEQ ID NO: 641 - DNA, 51 bp, Homo sapiens
aatcatgctctacttgattaaaaaartggtaaatcaaataaaaaattccaa

SEQ ID NO: 642 - DNA, 51 bp, Homo sapiens
tttgtctattctagacctttctacaytctgatccagtccagtcctgtctgg

SEQ ID NO: 643 - DNA, 51 bp, Homo sapiens
ctagataaagaaggaagtgtggagartagatgcttaagtcaaaaaatattt

SEQ ID NO: 644 - DNA, 51 bp, Homo sapiens
taatattgatcaagagccatattagraagggaccatcagttctaaaaatcc

SEQ ID NO: 645 - DNA, 51 bp, Homo sapiens
cttcatcacatttctagtaaagttayaaagccactatgtacaagatactga

SEQ ID NO: 646 - DNA, 51 bp, Homo sapiens
gcatttgcatttctttgcattgttaracccaacttaacaaatgctttcatc

SEQ ID NO: 647 - DNA, 51 bp, Homo sapiens
atgtgtctgcttaacaagaatcttarctgtcttcaatgtctttactggcta

SEQ ID NO: 648 - DNA, 51 bp, Homo sapiens
aataatgagataaagttttgttgtasagtcgtgatagtggaccctgtgaat

SEQ ID NO: 649 - DNA, 51 bp, Homo sapiens
ctgtgaataaaatacaacaacttaamcaagtgggagcaaaacattttatga

SEQ ID NO: 650 - DNA, 51 bp, Homo sapiens
atagtggtttccaagcattcttgcayattataatgacctaggaagctttta

SEQ ID NO: 651 - DNA, 51 bp, Homo sapiens
tgttcaccgaatttataataggcaaygcttttaatgaaattaatagcctgg

SEQ ID NO: 652 - DNA, 51 bp, Homo sapiens
ccccatcaacatttcaaatgatgtayagttttagaagagcttattattcaa

SEQ ID NO: 653 - DNA, 51 bp, Homo sapiens
gtagaatagagtactagaaagagtcratttgtgatgaagggagaaaaggat

SEQ ID NO: 654 - DNA, 51 bp, Homo sapiens
ctcaaagagaaagtcttctctaatgytcatatagtgcggacaagaaaaacg

SEQ ID NO: 655 - DNA, 51 bp, Homo sapiens
attttgtccatgtttttgctagtgayggtttatacagtagccagaaggcga

SEQ ID NO: 656 - DNA, 51 bp, Homo sapiens
gtatttgtgatccactagatgaaatyataagggaatactagacagaaaaga

SEQ ID NO: 657 - DNA, 51 bp, Homo sapiens
aagtttgaaatgctatgagaattatyaaagtaggacacagagacatgaagt

SEQ ID NO: 658 - DNA, 51 bp, Homo sapiens
aaattccctctttttgtaagaatacsagtcttatcagattaagacccattc

SEQ ID NO: 659 - DNA, 51 bp, Homo sapiens
taatcccatgtacttaacctttgcartaatcaaatctatatttggttcttt

SEQ ID NO: 660 - DNA, 51 bp, Homo sapiens
atgtgaccatcaccttttgctataaraactggtatttatccactccactgc

SEQ ID NO: 661 - DNA, 51 bp, Homo sapiens
aaggagaagtgtcctgataatagacrctaccggcattttagcacagagtga

SEQ ID NO: 662 - DNA, 51 bp, Homo sapiens
tctcctttctgttgcttcccaaagcmgatgattacaacacagcgagaagtt

SEQ ID NO: 663 - DNA, 51 bp, Homo sapiens
gtgtaacatatatgcccttagaggayggtgagcaatgccaggagttcattg

SEQ ID NO: 664 - DNA, 51 bp, Homo sapiens
taccaagacctgtgttatgtcggagmaaacaaaagacaacagatattcctt

SEQ ID NO: 665 - DNA, 51 bp, Homo sapiens
ttagctatgactgtattgttaccatsaaacattatgaacagggaaacagca

SEQ ID NO: 666 - DNA, 51 bp, Homo sapiens
gatgagctcaggaataaaacagatarctaaggataagtcattttcatccag

SEQ ID NO: 667 - DNA, 51 bp, Homo sapiens
atctagaaataattccacatatttaycaagaacatttaataaagaatccct

SEQ ID NO: 668 - DNA, 51 bp, Homo sapiens
tttaatggcacgagagatatttaccraagggattctttattaaatgttctt

SEQ ID NO: 669 - DNA, 51 bp, Homo sapiens
ccactgtcatctgtgcacccctaacragagcctggggatggacccgccaag

SEQ ID NO: 670 - DNA, 51 bp, Homo sapiens
tcctctggggaagccgtatgccttaracgagtcacttgaaattgttctaca

SEQ ID NO: 671 - DNA, 51 bp, Homo sapiens
aacttgttttaactctttcaattcaytagggtgttatttagtaagttcact

SEQ ID NO: 672 - DNA, 51 bp, Homo sapiens
atacaatgggtaacaacgtgagctawaactgagaagcctgcacccatagct

SEQ ID NO: 673 - DNA, 51 bp, Homo sapiens
tcacttctcttgagtaagtgcttagsagtgaaatggctagttcttttggta

SEQ ID NO: 674 - DNA, 51 bp, Homo sapiens
cagatagcagtatgttgtaagtagawcttgctggcactggtttcttggctg

SEQ ID NO: 675 - DNA, 51 bp, Homo sapiens
atggtttggattgagtagtcatagayatttacactgagatttaaataacag

SEQ ID NO: 676 - DNA, 51 bp, Homo sapiens
cctgtaggaaaagcaatgctttcccrcttagacctgcttgctcacctggct

SEQ ID NO: 677 - DNA, 51 bp, Homo sapiens
tgtcctttcatagagcaagcaatgaraagagatgatcatctttttttcaat

SEQ ID NO: 678 - DNA, 51 bp, Homo sapiens
ccctatgaagcatgagctcatcttcyagcatggatagcagtcttgactaac

SEQ ID NO: 679 - DNA, 51 bp, Homo sapiens
aaatgtttgacgtctcattagcctcragatgatttttaacatggccagggg

SEQ ID NO: 680 - DNA, 51 bp, Homo sapiens
ttagaatgaaccctgtgtattgttgsattggaattggatattgatgtgaat

SEQ ID NO: 681 - DNA, 51 bp, Homo sapiens
ctttagccaaaagactaggaattagrcagccttgtaagacagaagactttt

SEQ ID NO: 682 - DNA, 51 bp, Homo sapiens
tcattttctagccaataataaccaayttagttgctaaactaataatttaac

SEQ ID NO: 683 - DNA, 51 bp, Homo sapiens
gaggagcagaatcatctgaggagcaygttaaaaagcagagtcttgaccatg

SEQ ID NO: 684 - DNA, 51 bp, Homo sapiens
tggcctctgatatcagttgtgtttcyagctgtaaaagcacaatagcatcta

SEQ ID NO: 685 - DNA, 51 bp, Homo sapiens
atgcctttggctgttagatgcaaaaygctctgaactagtttgttcaataac

SEQ ID NO: 686 - DNA, 51 bp, Homo sapiens
ccttctagatatttatagccaaaccrcttaattcaaagtttactaagaggt

SEQ ID NO: 687 - DNA, 51 bp, Homo sapiens
aaataggataggacaacattttaacygaaatgacatatgacaactcaaaac

SEQ ID NO: 688 - DNA, 51 bp, Homo sapiens
acatgccgaagcttagctgaattggmatgtagatattttttggtcacttga

SEQ ID NO: 689 - DNA, 51 bp, Homo sapiens
atagcccaggagaataaactcagaaragaatcaaagataatcttagaggga

SEQ ID NO: 690 - DNA, 51 bp, Homo sapiens
atctgctaggttgtggcttatttcaycactgtactgaatctcactacttta

SEQ ID NO: 691 - DNA, 51 bp, Homo sapiens
tattttccttgttcctaaaactttgyaattgtctcatcttttcacaaaatg

SEQ ID NO: 692 - DNA, 51 bp, Homo sapiens
tgcttttttggcatagtagaatttgyattttgttccacaataccttcatct

SEQ ID NO: 693 - DNA, 51 bp, Homo sapiens
aatatttacctttgaattggactcaytgaaaatagctagaaggaatgtaag

SEQ ID NO: 694 - DNA, 51 bp, Homo sapiens
cctcattgtagtctttgtgccctcayataatcaatctttctactcaaaggt

SEQ ID NO: 695 - DNA, 51 bp, Homo sapiens
tttaaaaatgatcaaatacctctcaraactttccagaatataaattcccat

SEQ ID NO: 696 - DNA, 51 bp, Homo sapiens
cacttagctcccagtacctagttggyaggccactgaatagaaaggttccag

SEQ ID NO: 697 - DNA, 51 bp, Homo sapiens
tttattgatagtaatcagccaattarcattttcattgagtattctcatagt

SEQ ID NO: 698 - DNA, 51 bp, Homo sapiens
tcttatgttttatcaatatcttgaarcttaattcaaaccaccctttataaa

SEQ ID NO: 699 - DNA, 51 bp, Homo sapiens
atccaaagctttctcaagcaagataygtactgtcagtagaaagagtaaagc

SEQ ID NO: 700 - DNA, 51 bp, Homo sapiens
tcagagtttaggagcaggagatataygatgtgctatttttagggtcataga

SEQ ID NO: 701 - DNA, 51 bp, Homo sapiens
ggcttaagatagggatcccaataaaygtctgtgcaaaagtctacaagtaaa

SEQ ID NO: 702 - DNA, 51 bp, Homo sapiens
atgaatggagtctgtcttaagatcaktacagaatatcgcacatattatatt

SEQ ID NO: 703 - DNA, 51 bp, Homo sapiens
ctaaggcatcaagcaggtaactatartaggcaaaggaagcaagatgacaag

SEQ ID NO: 704 - DNA, 51 bp, Homo sapiens
aagtattctatgccagtctccgttcractttgaagatgctgaccaggggaa

SEQ ID NO: 705 - DNA, 51 bp, Homo sapiens
catgggccaagtcacaggttctaackctattgctgggacaaaagataattg

SEQ ID NO: 706 - DNA, 51 bp, Homo sapiens
ttcagtggaacaagtgagtgttctgraaagtacaacaggatcaagttttgt

SEQ ID NO: 707 - DNA, 51 bp, Homo sapiens
gctgaggaagtcaggtgatgatgcamgaactttaaggagtgcttacctgtg

SEQ ID NO: 708 - DNA, 51 bp, Homo sapiens
agccttccgatccagtttagttaccracagttgcataacattagctatcgc

SEQ ID NO: 709 - DNA, 51 bp, Homo sapiens
gccataaatccttctctacctctaaygatcagaacctactgatgtttacca

SEQ ID NO: 710 - DNA, 51 bp, Homo sapiens
gcaggattaaaaacaatgactcatayagtgagaaagtgattgctattccgg

SEQ ID NO: 711 - DNA, 51 bp, Homo sapiens
aagcatctttgcccaaagataaaaayggataaaagactgtacttactgtga

SEQ ID NO: 712 - DNA, 51 bp, Homo sapiens
aaaaagcacaatccattctacatcayggtctatggctggagataacagtca

SEQ ID NO: 713 - DNA, 51 bp, Homo sapiens
aggtcaagtttgtatcactgtagcaytgacatgtttgttttcacaccatac

SEQ ID NO: 714 - DNA, 51 bp, Homo sapiens
ttttgaaataatgattgcttgataarttaaaggaggctttaagttaaataa

SEQ ID NO: 715 - DNA, 51 bp, Homo sapiens
ctgagagaaggaggaaagaaagaccrgatgctttattaagaggctggagct

SEQ ID NO: 716 - DNA, 51 bp, Homo sapiens
agcatcaatatcatgcttggttatgragcagatcctgaaatgatattatgc

SEQ ID NO: 717 - DNA, 51 bp, Homo sapiens
ctaccacttgatgacttgactccttmaacaggtgacttcagggtcaccgca

SEQ ID NO: 718 - DNA, 51 bp, Homo sapiens
tacccaagtgcttgtaggtgacttayaattcccagccttcgctcagatctg

SEQ ID NO: 719 - DNA, 51 bp, Homo sapiens
ggttctatatttgactctatttgggktgttatcttttggttaatttctcag

SEQ ID NO: 720 - DNA, 51 bp, Homo sapiens
taattgcaatccaacacttataaaayacatggaagaagaacatgcaatgga

SEQ ID NO: 721 - DNA, 51 bp, Homo sapiens
tttttggagtacaagaaaattgagtytgaattaatttctgccaataatttg

SEQ ID NO: 722 - DNA, 51 bp, Homo sapiens
taaatgtaggatatgatgaacatgcygaagagaaactgctgttgatgtgga

SEQ ID NO: 723 - DNA, 51 bp, Homo sapiens
cattaccattcatactaaatctatayctttgctcaggtcattcccctcgtt

SEQ ID NO: 724 - DNA, 51 bp, Homo sapiens
tgaaagttgactgagttctgagagaygaaatgactttaagttgctgatttt

SEQ ID NO: 725 - DNA, 51 bp, Homo sapiens
gattctgctgtgaaccatgaggaacsgaattgcaggtggatctcagttgcc

SEQ ID NO: 726 - DNA, 51 bp, Homo sapiens
atccactgacacacctttggcaatartacccagatattctctacaattgca

SEQ ID NO: 727 - DNA, 51 bp, Homo sapiens
agtgatgggagacagtaggcagtacmaatagtacctgttttttggttgcca

SEQ ID NO: 728 - DNA, 51 bp, Homo sapiens
gcaaagagtgtctgtttacctaataygtgacaagtatatatttcagcccat

SEQ ID NO: 729 - DNA, 51 bp, Homo sapiens
aacatttttatatagcatcaggaagyataagcaaatcaaattctctaaaaa

SEQ ID NO: 730 - DNA, 51 bp, Homo sapiens
cacatttctgcttaactttctgcagyagagacaagagatttgatgtctgga

SEQ ID NO: 731 - DNA, 51 bp, Homo sapiens
gcacaggatttgtaaaagactgaaaygaaacaacatacatgattgcattga

SEQ ID NO: 732 - DNA, 51 bp, Homo sapiens
aaaaggaattcaattaaataggaacratgattgatttctgcaagctcctta

SEQ ID NO: 733 - DNA, 51 bp, Homo sapiens
cacattcctctagggagatagaccamagaaacaagtacaatgcagtgtgaa

SEQ ID NO: 734 - DNA, 51 bp, Homo sapiens
aatctgaaggaatgactctgtaagayggttcaagtaaacaaggagtcttgc

SEQ ID NO: 735 - DNA, 51 bp, Homo sapiens
caatattgaacagtcagagaaaagamgagtaaccagcaaaggaggtctatc

SEQ ID NO: 736 - DNA, 51 bp, Homo sapiens
gaaagaaagaaaagaagacagagaasttaagatgttagagaaagaagcagc

SEQ ID NO: 737 - DNA, 51 bp, Homo sapiens
gtaaaatacaaagaatatgctataartaagtgcaaaagggccaaataacat

SEQ ID NO: 738 - DNA, 51 bp, Homo sapiens
gttagatgccatgctttaatgattasactgtactatagccagtgctgaagc

SEQ ID NO: 739 - DNA, 51 bp, Homo sapiens
gagtaagactgcctgttgtgacggtyaagtgttagtggaaggaaagaggac

SEQ ID NO: 740 - DNA, 51 bp, Homo sapiens
gactcaaatgccattgaaacgtgaaycgatagataaattatggtgtatcca

SEQ ID NO: 741 - DNA, 51 bp, Homo sapiens
ctgtcccaagatttttcattgattaygtcttccatggtgagatttcaggca

SEQ ID NO: 742 - DNA, 51 bp, Homo sapiens
tcatttaactaatagttcctaaataygtaaaaagatcttgtcactatgcat

SEQ ID NO: 743 - DNA, 51 bp, Homo sapiens
ttattgattagtctatttctccttgyaggtgtgtaattctagactaattaa

SEQ ID NO: 744 - DNA, 51 bp, Homo sapiens
ccatccagacagttttcaagtgtacrgaatttgaggaacaatgtatgcttt

SEQ ID NO: 745 - DNA, 51 bp, Homo sapiens
atagcaccatggttcaaaaaagctamcttgatcagtaagtggtagaggcca

SEQ ID NO: 746 - DNA, 51 bp, Homo sapiens
catgtaggggctgctttccctgcacratccaggtccttggttgggcttacg

SEQ ID NO: 747 - DNA, 51 bp, Homo sapiens
acatgactaatgggcacgtaaattaratgttactaagcaagagactattct

SEQ ID NO: 748 - DNA, 51 bp, Homo sapiens
gtagtatgtaaagaacagaaagcaayagagtagcccagaagtaagcacatc

SEQ ID NO: 749 - DNA, 51 bp, Homo sapiens
gtgtgggttctaaaccaaaaatcagraacacagactccctggcttgcagga

SEQ ID NO: 750 - DNA, 51 bp, Homo sapiens
tcagtaatcttctgaaactactgtcsttgttgttcaaaaagcaatgaagcc

SEQ ID NO: 751 - DNA, 51 bp, Homo sapiens
gggactataggcacctgctactgtayctggctaaaatgttttttaagctgg

SEQ ID NO: 752 - DNA, 51 bp, Homo sapiens
ggtgctgccagcagttctctctgggwaggattgtggtataattctttccac

SEQ ID NO: 753 - DNA, 51 bp, Homo sapiens
cactctccctttgccactgcactagyaaacgtttgtgaaaagaatctgcag

SEQ ID NO: 754 - DNA, 51 bp, Homo sapiens
tctagaactcagctgtcgtgagagasaagtgtaagcctgtgggtaggagca

SEQ ID NO: 755 - DNA, 51 bp, Homo sapiens
ggactttatcccaggtgtagcaccaytgagaggttttcaacagggaaatga

SEQ ID NO: 756 - DNA, 51 bp, Homo sapiens
ttgttttatgccaagcactttgttaygtgttgaggataagccgcttggttc

SEQ ID NO: 757 - DNA, 51 bp, Homo sapiens
ccctgcattcttgtctgtttcctggratctataatgcccatgccctgtatc

SEQ ID NO: 758 - DNA, 51 bp, Homo sapiens
tctttctcctcccggcttaactaatyataaccaaatctggggaaggcaggg

SEQ ID NO: 759 - DNA, 51 bp, Homo sapiens
ttttctgggcttgctttaaggtgaartaaggcactcacaactctagatagc

SEQ ID NO: 760 - DNA, 51 bp, Homo sapiens
ctgttgagtcaataattatggtcaartcctgttgagagatgagtccagggt

SEQ ID NO: 761 - DNA, 51 bp, Homo sapiens
ttttaagcgatttaatacacataacratcagatgctatccctgtattggat

SEQ ID NO: 762 - DNA, 51 bp, Homo sapiens
ttcattcactcattcaatatccaacmaatatttatagattgattattccaa

SEQ ID NO: 763 - DNA, 51 bp, Homo sapiens
tgaagcaggaataacataacttatcrgaaagaacacacagccaaagatgat

SEQ ID NO: 764 - DNA, 51 bp, Homo sapiens
taaaagggaactagcaggaggatccmaacttgttcatgcccttaaaggccc

SEQ ID NO: 765 - DNA, 51 bp, Homo sapiens
tgaggcttcaagccaggatttatackaaagcatgtgccagaccatgtgctt

SEQ ID NO: 766 - DNA, 51 bp, Homo sapiens
caaaatataaatacaagtactttggsaccatatgaaaaagggatttgacct

SEQ ID NO: 767 - DNA, 51 bp, Homo sapiens
aactctataaaagactctaaatggaytactggttaggaagtatgggaagtt

SEQ ID NO: 768 - DNA, 51 bp, Homo sapiens
tccaaaagcacattgaatgtcaagcrccatagtatctctggcagacatgct

SEQ ID NO: 769 - DNA, 51 bp, Homo sapiens
gtaatttttaacatttacgtcaaggrcatattgtaggaaccaaggagataa

SEQ ID NO: 770 - DNA, 51 bp, Homo sapiens
tgatttttattatgtaaggctcaccrtgtcaactaacacaaaccttttggg

SEQ ID NO: 771 - DNA, 51 bp, Homo sapiens
ggaagaagacaaagagaaaggcaaaygtattgtgtatctaaaaagcatgtg

SEQ ID NO: 772 - DNA, 51 bp, Homo sapiens
aaccaccacactcggccagaattccrcatttttattattagattctctttc

SEQ ID NO: 773 - DNA, 51 bp, Homo sapiens
tgtaccaagtagagacaggaggatcrggtagaataatactcagcatgtgac

SEQ ID NO: 774 - DNA, 51 bp, Homo sapiens
cttcatccccctcaaaataatgtaakcatagtaacatgtgatgagaggcag

SEQ ID NO: 775 - DNA, 51 bp, Homo sapiens
gggaagttcaacgctaagtcagaccraggctggcccatgggattcatgaag

SEQ ID NO: 776 - DNA, 51 bp, Homo sapiens
ctattgtagcttttttcagaaataasgactcatttttagaaaagaaaaaaa

SEQ ID NO: 777 - DNA, 51 bp, Homo sapiens
catatgtcaatcattccctgggattmgtctccaggcatgattttatgttag

SEQ ID NO: 778 - DNA, 51 bp, Homo sapiens
accacagagaataaaatttcagtgcratgactttcagcaatgtttttcaat

SEQ ID NO: 779 - DNA, 51 bp, Homo sapiens
atgtacctagcctggagcttgacaartagtagatgtataagaaatgtttgt

SEQ ID NO: 780 - DNA, 51 bp, Homo sapiens
tgtggagtgaatttgcctttgttccrgcctggagtggaagcaagaatacag

SEQ ID NO: 781 - DNA, 51 bp, Homo sapiens
tccaagggaccaaaagaagccatagwatgtgtgggcaggtgtaggcgtgag

SEQ ID NO: 782 - DNA, 51 bp, Homo sapiens
ctcccttggctaacttgaagtctgaycctttataccagaactgtaagacag

SEQ ID NO: 783 - DNA, 51 bp, Homo sapiens
atctgtcattcagcttcttcctaccragtgtgaggtgccacactcttcagt

SEQ ID NO: 784 - DNA, 51 bp, Homo sapiens
cataataagacctaagctgtggtgamaagttggtaaatacttaataattgg

SEQ ID NO: 785 - DNA, 51 bp, Homo sapiens
cccataggcttttgagaagaagaacragtggatataaagaaatgtggcatt

SEQ ID NO: 786 - DNA, 51 bp, Homo sapiens
caagataaggcgccactacataaaakgattcagaaagtccaagggctctag

SEQ ID NO: 787 - DNA, 51 bp, Homo sapiens
gtccttctctgactatggtgtgctawctttttaattcatgtataattctgg

SEQ ID NO: 788 - DNA, 51 bp, Homo sapiens
cataccatgccctgaactcagttgarccattcagataatcgtctcaattca

SEQ ID NO: 789 - DNA, 51 bp, Homo sapiens
ggttctgagatacactgttgagtgargagaagtgtgctgcggacaatacat

SEQ ID NO: 790 - DNA, 51 bp, Homo sapiens
tcagtcacagttctcttctgtatcaygcaaggttccaggtccttccccagg

SEQ ID NO: 791 - DNA, 51 bp, Homo sapiens
gtaggcgcttaaaaaatatttgtggractaaggaattggatgataaaatga

SEQ ID NO: 792 - DNA, 51 bp, Homo sapiens
aagatggtacctgcgaggtctgtaayaaacagatgcagggtttagtcactg

SEQ ID NO: 793 - DNA, 51 bp, Homo sapiens
tactgagccaaaacaatatgaaatgstctttcagaggcacgggcctggcct

SEQ ID NO: 794 - DNA, 51 bp, Homo sapiens
tggccatcttaattagcttcctaaasgattattacatcaaagtatgtcact

SEQ ID NO: 795 - DNA, 51 bp, Homo sapiens
atttctaacataaactcacaaacgarctcaggatggactgttaaaaatact

SEQ ID NO: 796 - DNA, 51 bp, Homo sapiens
catttacctcattgggttatataagyattaaatgagttaataaccaaaagc

SEQ ID NO: 797 - DNA, 51 bp, Homo sapiens
tactttttattcttctatgaaatccrtaagcctccatatatacttattctt

SEQ ID NO: 798 - DNA, 51 bp, Homo sapiens
ttgaaatgggacatggaggaacacayggctttggatatggagtgggccatg

SEQ ID NO: 799 - DNA, 51 bp, Homo sapiens
ctcactaatccagttcactaaggtasgaagccacaataaagtttggagcca

SEQ ID NO: 800 - DNA, 51 bp, Homo sapiens
gccacaataaagtttggagccaaaaytgtagatataaagagagttccttta

SEQ ID NO: 801 - DNA, 51 bp, Homo sapiens
caagggtgggaaaacattttctacckaatttaaaccagtggcatttgtgtc

SEQ ID NO: 802 - DNA, 51 bp, Homo sapiens
ctgctactggtggtcagatgtgccayagagtataagaaaccttgggagaaa

SEQ ID NO: 803 - DNA, 51 bp, Homo sapiens
tggggaacaccattgaagtaaaatcrgaaaaatatctgagcatatgcttca

SEQ ID NO: 804 - DNA, 51 bp, Homo sapiens
gctgccttttcctatgtaactaacayctctaccctcaacctgaatggtaca

SEQ ID NO: 805 - DNA, 51 bp, Homo sapiens
cacactgttgtgcaacagattttcaraagttttcattttgcaaaacagaaa

SEQ ID NO: 806 - DNA, 51 bp, Homo sapiens
acacaaaacagatccagtttggagamggaaaaaggtgggctacttgggcct

SEQ ID NO: 807 - DNA, 51 bp, Homo sapiens
ggagaaagcacaactgacaaaatgtraattaactcttgcagcttcatattt

SEQ ID NO: 808 - DNA, 51 bp, Homo sapiens
acagcactttgggaggccgagatggktctatcaatggaggccaggagtttg

SEQ ID NO: 809 - DNA, 51 bp, Homo sapiens
ataaataatcaccttccagaattaargaccagtattgctgtgtttttaaag

SEQ ID NO: 810 - DNA, 51 bp, Homo sapiens
ggggctagaggtcagatactgacaakgaacagttttctatgtatgatgcta

SEQ ID NO: 811 - DNA, 51 bp, Homo sapiens
taatcacatttaataataggataccsagaaacaaatacctcacatactgta

SEQ ID NO: 812 - DNA, 51 bp, Homo sapiens
caactcttgccttgttcctatatgayaatgcagccaaacctttgtgcctct

SEQ ID NO: 813 - DNA, 51 bp, Homo sapiens
aaatacgtgccagcttaagcagttayagacatcatagaatatcttaaactg

SEQ ID NO: 814 - DNA, 51 bp, Homo sapiens
aaacaagctttgagacccttcccgcracatctctgggggagcccaggaacc

SEQ ID NO: 815 - DNA, 51 bp, Homo sapiens
taaaatgaaagtactatctcatgtaycaaaagggataagtatcaaaaacat

SEQ ID NO: 816 - DNA, 51 bp, Homo sapiens
tctctggaggcccttatccaaaggasgtgttaggctaattgtgagggttag

SEQ ID NO: 817 - DNA, 51 bp, Homo sapiens
ggttgttatcactgaaacctcagaayattagttgtttcttaaacaatgtac

SEQ ID NO: 818 - DNA, 51 bp, Homo sapiens
actctaccctaaagtcaaatatcaayagctgcaggtactcaaggatctttg

SEQ ID NO: 819 - DNA, 51 bp, Homo sapiens
tcacaaagcaaaccagttcatatggrcacctagaaaataattttgaataaa

SEQ ID NO: 820 - DNA, 51 bp, Homo sapiens
gcaaagttccttacaagagaaatgcmaggagagtcggaagaaggcaatggg

SEQ ID NO: 821 - DNA, 51 bp, Homo sapiens
tggcccacttggaaatcctaactccrcagaacaaaattttacaagcttcct

SEQ ID NO: 822 - DNA, 51 bp, Homo sapiens
tgcttgacagatataaggcattcacyaaatacatatgggaagaaaggcagg

SEQ ID NO: 823 - DNA, 51 bp, Homo sapiens
aaaatacaattcacataccataaaaytggattcatttaaaatgtagaattc

SEQ ID NO: 824 - DNA, 51 bp, Homo sapiens
cacttgaattgcaactcacccatggraagttatggaatcttggcatgaact

SEQ ID NO: 825 - DNA, 51 bp, Homo sapiens
accctcaaggtggtggaaattgagayggtgataataattataacagaagca

SEQ ID NO: 826 - DNA, 51 bp, Homo sapiens
ttaagacattagctatttggaatgastatctttcatttttaaccagatgat

SEQ ID NO: 827 - DNA, 51 bp, Homo sapiens
ttgaagcctgtgtttctttaagtcaraggtatatatttcacaatcttggaa

SEQ ID NO: 828 - DNA, 51 bp, Homo sapiens
ggtagaagcccagggtcatcatttaycccttgtcttaacataagattctcc

SEQ ID NO: 829 - DNA, 51 bp, Homo sapiens
agaattattgaaagaattaagtcacracatgagtctctaatgcacaaattg

SEQ ID NO: 830 - DNA, 51 bp, Homo sapiens
tgtccaattactctttcctactaaawgccaataacctaggaagaattttag

SEQ ID NO: 831 - DNA, 51 bp, Homo sapiens
cagaattcactctttcacttattaarcattgactgtgtactagacccagtg

SEQ ID NO: 832 - DNA, 51 bp, Homo sapiens
cagcacacccaggttgctaggcctgmagaaagggcaggatttccgtgctag

SEQ ID NO: 833 - DNA, 51 bp, Homo sapiens
gaagcaacagaaaatgttaccttcarcaggatgccacatggaggtgtctgt

SEQ ID NO: 834 - DNA, 51 bp, Homo sapiens
ctctagaggcccaagaacacagaggwccatgtataataaatggaaaacatc

SEQ ID NO: 835 - DNA, 51 bp, Homo sapiens
acattatgtacctagtgaatttccastacctgagtctcacacctgacaaaa

SEQ ID NO: 836 - DNA, 51 bp, Homo sapiens
attggtggtcttctgtgtccactcayggtcagtattagcagtaaaaagtgg

SEQ ID NO: 837 - DNA, 51 bp, Homo sapiens
aagcatctctttctgaagtaataacrctatgtcctcactggctattgatat

SEQ ID NO: 838 - DNA, 51 bp, Homo sapiens
tctgtacattcactcacaactgtgarcagcccataaatattcaatactcaa

SEQ ID NO: 839 - DNA, 51 bp, Homo sapiens
tgattatattattgttaaactgctakccatttattttgattattatgaatt

SEQ ID NO: 840 - DNA, 51 bp, Homo sapiens
gcacatcttaccgatctaaatctggkaatgtaatctagtagcataaaaata

SEQ ID NO: 841 - DNA, 51 bp, Homo sapiens
ttggcccatcaatcttatttagaacmaaagagattaaaaattagttagttt

SEQ ID NO: 842 - DNA, 51 bp, Homo sapiens
taaatcttgaataatttactttatgratcattttactgaaaaaaaatctct

SEQ ID NO: 843 - DNA, 51 bp, Homo sapiens
tcctagggatgcaaggatggcttaamgtatgcaaatcaaccaatgtaatac

SEQ ID NO: 844 - DNA, 51 bp, Homo sapiens
cagtcccaaacctgctgctattaccrattctcattattcttcttatgttct

SEQ ID NO: 845 - DNA, 51 bp, Homo sapiens
caaatccagtgaggctgagtgaacastgatttttatcaatgcattctatgg

SEQ ID NO: 846 - DNA, 51 bp, Homo sapiens
ttaagctctttttcctgactatagcyaataccatttatttgacatcaacaa

SEQ ID NO: 847 - DNA, 51 bp, Homo sapiens
tgcttcctttatgccattgtaaagargtagaatttaagtcaagaagggctt

SEQ ID NO: 848 - DNA, 51 bp, Homo sapiens
ctacgatgtgccaagtcctacatgaraggccataaagaataagttggaaac

SEQ ID NO: 849 - DNA, 51 bp, Homo sapiens
aacaattgttccaattctaaacccaytgacataggccgtcaagaaaaaatg

SEQ ID NO: 850 - DNA, 51 bp, Homo sapiens
atttgtgtctctcgatatcttaccaygataaatcaaatccatcgctaatca

SEQ ID NO: 851 - DNA, 51 bp, Homo sapiens
atgggaaaagtgaagattccattaaygtctaatcagtagaaatttgtgcac

SEQ ID NO: 852 - DNA, 51 bp, Homo sapiens
attgttgttattttgtgttaaagtaygaagatcttaatgttaagacaatag

SEQ ID NO: 853 - DNA, 51 bp, Homo sapiens
ttaccaaatttgcaaaaatgtgagasatcttaacagaaaatagggagatag

SEQ ID NO: 854 - DNA, 51 bp, Homo sapiens
agtcttgtaaacgtaagcccctgacrgtatacatgagttaaggatagaatc

SEQ ID NO: 855 - DNA, 51 bp, Homo sapiens
tctgggctttcattcatagtaaaaamtcattaagactgcatttatggcagc

SEQ ID NO: 856 - DNA, 51 bp, Homo sapiens
gctgagaggtttaaggcacatcaacrgaaaagggaaatggaaagaaaaatg

SEQ ID NO: 857 - DNA, 51 bp, Homo sapiens
atctctaagtcattaacataataaaytaggtgttactcatatctattactt

SEQ ID NO: 858 - DNA, 51 bp, Homo sapiens
gagatgagatcagcctggtttgttamatttcatggccttttcttttcctca

SEQ ID NO: 859 - DNA, 51 bp, Homo sapiens
tcaagagaaatttgtcacaactaaamgggagaacagaaatcaatatctggt

SEQ ID NO: 860 - DNA, 51 bp, Homo sapiens
aattgctgaaaatcaatgatagaacrtcatccttccattggctgaattaca

SEQ ID NO: 861 - DNA, 51 bp, Homo sapiens
caccgaagaatatcagataataagasaacctaatagaaaccattaagttag

SEQ ID NO: 862 - DNA, 51 bp, Homo sapiens
acagactaaattctgccacatatacygccatttgtaagcccaactcttatt

SEQ ID NO: 863 - DNA, 51 bp, Homo sapiens
ttttttggcaaaaatgatggtcaacratgatgaatatttgagtagacacac

SEQ ID NO: 864 - DNA, 51 bp, Homo sapiens
tgtcatcagctctgtcttacaaatgyagttgtgaattggatggaacatttc

SEQ ID NO: 865 - DNA, 51 bp, Homo sapiens
agagagacaacacacaaaattttcaytaacaacctcagcgcaggtagtccc

SEQ ID NO: 866 - DNA, 51 bp, Homo sapiens
actgttcaatgcatatagatatagaratccagtcgtacaagatgaaaagtt

SEQ ID NO: 867 - DNA, 51 bp, Homo sapiens
ctctatgagtatctgagactttaacwctgcattattgaatagttaaaactg

SEQ ID NO: 868 - DNA, 51 bp, Homo sapiens
gctttttttttctttagttgacataygcattgacactctggctgcttgtgg

SEQ ID NO: 869 - DNA, 51 bp, Homo sapiens
aaaaaccttacccaggactctcataygtttactatctatctaagtgatttc

SEQ ID NO: 870 - DNA, 51 bp, Homo sapiens
gaggtaaaaattcagaaaaaaagcartatgtaaactaattaggagtctgaa

SEQ ID NO: 871 - DNA, 51 bp, Homo sapiens
gccaatacagttttgaatgaagatayggctttttgtggaagaaggaattga

SEQ ID NO: 872 - DNA, 51 bp, Homo sapiens
ggtcacaagttccacttgaaacatayaaattggtgagggggtagggggcag

SEQ ID NO: 873 - DNA, 51 bp, Homo sapiens
atattataggagacgatgtcaaataytaaagcttcaataataagtggacta

SEQ ID NO: 874 - DNA, 51 bp, Homo sapiens
aaatcatgcaggaaagaaagggtagwagttgacaacatgtagtacttccta

SEQ ID NO: 875 - DNA, 51 bp, Homo sapiens
ctataaattatattattaactcaaawggtgacaataattgagagacagcag

SEQ ID NO: 876 - DNA, 51 bp, Homo sapiens
tacttaatctgagcttcagaaagtcycttgcgatgctatctaggtactggg

SEQ ID NO: 877 - DNA, 51 bp, Homo sapiens
gtatttgccttaaatttaacttacaygttggcttctcagatgaagtgtttt

SEQ ID NO: 878 - DNA, 51 bp, Homo sapiens
gtaagggatttgaggtggtttgaaarattatatacaataaaaaagaaaaat

SEQ ID NO: 879 - DNA, 51 bp, Homo sapiens
gcattgatgttcctgtaactctgcartaagtacttgagcacagccagactt

SEQ ID NO: 880 - DNA, 51 bp, Homo sapiens
gcacttcgggtacaaagtgataaccrgacgtcatttttcttggaaaaatcg

SEQ ID NO: 881 - DNA, 51 bp, Homo sapiens
gaaaacaatccatttaacatacctayaaatacctctttatctcttccttgc

SEQ ID NO: 882 - DNA, 51 bp, Homo sapiens
gacagtttggtgctgaaatagtcaamggacaatcaaatgaccttaaagtga

SEQ ID NO: 883 - DNA, 51 bp, Homo sapiens
tttgtattatttgtattacttagtargaaggaacattatgaagatgctgaa

SEQ ID NO: 884 - DNA, 51 bp, Homo sapiens
aaggagattccctgtttccatgtaamaagggtattttgggttgccattaag

SEQ ID NO: 885 - DNA, 51 bp, Homo sapiens
cataaagttcaagagttatacttcaycaattctttttgtcttcagcagaga

SEQ ID NO: 886 - DNA, 51 bp, Homo sapiens
tcctgacagggcaggtattgagaaasttaattttgagatttaaatttttaa

SEQ ID NO: 887 - DNA, 51 bp, Homo sapiens
atattttctttttatagctttgccawcataatcatattacatcctgacacc

SEQ ID NO: 888 - DNA, 51 bp, Homo sapiens
atgcaaagtttgagatttttacaacygaaatcattttgctgtggtgatctt

SEQ ID NO: 889 - DNA, 51 bp, Homo sapiens
tcccatgagagaaagacgggggtaaygaatagaatagacagagtccagaaa

SEQ ID NO: 890 - DNA, 51 bp, Homo sapiens
acagtagagacatgtaggaataaatyaactaaaggatatgcaagacttcta

SEQ ID NO: 891 - DNA, 51 bp, Homo sapiens
tactagaaatccctgggtgaaccacracaagccttttaagactagcaagcc

SEQ ID NO: 892 - DNA, 51 bp, Homo sapiens
ataacacacaaattacaatgtcttcratgtgtatactgcctcacaggttgc

SEQ ID NO: 893 - DNA, 51 bp, Homo sapiens
gccttcagggtctctcccttgcatamgtttccaggctcatcattctcctcc

SEQ ID NO: 894 - DNA, 51 bp, Homo sapiens
gcagacagacgtttctctgtagagtraatagtgacagagatgtattagaaa

SEQ ID NO: 895 - DNA, 51 bp, Homo sapiens
taaattatggtacgtaccaattatamtgctgttaaaaagaatgacgtggat

SEQ ID NO: 896 - DNA, 51 bp, Homo sapiens
tctcatgcatccaaagctcctgttaygaacattcctggattgtgaatttgt

SEQ ID NO: 897 - DNA, 51 bp, Homo sapiens
aggtagttcccaaatgttggaccacragatgatgatctccacacagaacag

SEQ ID NO: 898 - DNA, 51 bp, Homo sapiens
ttcaggtttgagctttgtctttcaaycatttcagagcccaaggaggaagct

SEQ ID NO: 899 - DNA, 51 bp, Homo sapiens
catcaccatttaaggagaccattacyaattccaatgtgatctctgtccttg

SEQ ID NO: 900 - DNA, 51 bp, Homo sapiens
ctgctgagggactcttgctgggtgaragaagtaccttccgtgttttcttca

SEQ ID NO: 901 - DNA, 51 bp, Homo sapiens
gtacactcagatgattccttcagacygtctcttgtcagggagagtaagaat

SEQ ID NO: 902 - DNA, 51 bp, Homo sapiens
ctatcaaagttcaaggcacattgaaytgactacttttattaaaaccatatg

SEQ ID NO: 903 - DNA, 51 bp, Homo sapiens
taaaaaaaaattcttaaatgaaaaaraaaggacacctcaactgaagatgag

SEQ ID NO: 904 - DNA, 51 bp, Homo sapiens
aagtgtgatgatttgtcttttgtaarcctatgaactagaatgactcacata

SEQ ID NO: 905 - DNA, 51 bp, Homo sapiens
tagatgaacattagaacaaatttgtmaagttctcccaataccacttaattt

SEQ ID NO: 906 - DNA, 51 bp, Homo sapiens
actaaaagcttgcccgaattgcaacraagtactatggtttgaatgtcccct

SEQ ID NO: 907 - DNA, 51 bp, Homo sapiens
ctttacactgcttactttctctatcrcttttcccaaatacgtccccagtaa

SEQ ID NO: 908 - DNA, 51 bp, Homo sapiens
atatgcaacactataattatcactcygagtcataacccactagcttcccta

SEQ ID NO: 909 - DNA, 51 bp, Homo sapiens
gtaagcttagccttcctgtgttttasactagtgatctttcacatacagcag

SEQ ID NO: 910 - DNA, 51 bp, Homo sapiens
aaatatgttttatataccttttccartctcttcttctggaacactctaagg

SEQ ID NO: 911 - DNA, 51 bp, Homo sapiens
tcctatgtatctatcttagaaaaacmcaatagtatacacagaggcatttca

SEQ ID NO: 912 - DNA, 51 bp, Homo sapiens
aaaggacatcctttctatctctaccrgattcactctctctttgaagaaagc

SEQ ID NO: 913 - DNA, 51 bp, Homo sapiens
gattatgtttttcagaaaggagtcamtagatactatcaagggttactaaac

SEQ ID NO: 914 - DNA, 51 bp, Homo sapiens
agtgccacagccatcatgatgtagasagggtatcaagggagagcaaaacag

SEQ ID NO: 915 - DNA, 51 bp, Homo sapiens
tgcacttgaagaatgcaattggggayaaagtcacaaataccctgcagtgcc

SEQ ID NO: 916 - DNA, 51 bp, Homo sapiens
ctcaaagagataccctaaaaaccaakaactgcacttgaagaatgcaattgg

SEQ ID NO: 917 - DNA, 51 bp, Homo sapiens
ccagaccagcactcttctgggtacartagggaaatacgaagaatatctgtg

SEQ ID NO: 918 - DNA, 51 bp, Homo sapiens
ttatgaagctctattagcattatagscaaggttaattgatcatttcagtac

SEQ ID NO: 919 - DNA, 51 bp, Homo sapiens
gaattgaaaagaccagtttcttggayggccagctagagatgagctgaattt

SEQ ID NO: 920 - DNA, 51 bp, Homo sapiens
aaaaatgggttgtgtcatttcttatyacaacaaaagattttcttgatgggg

SEQ ID NO: 921 - DNA, 51 bp, Homo sapiens
catacacttcaatatatttgtgcatmaaatttcaaaagctctagaaccctg

SEQ ID NO: 922 - DNA, 51 bp, Homo sapiens
agcagctggaagaagaatattgaccrctctcaacccaaagaaatgataaat

SEQ ID NO: 923 - DNA, 51 bp, Homo sapiens
gtagcatgaaaacagtcatgcttaartgttgattatttcattcttcacata

SEQ ID NO: 924 - DNA, 51 bp, Homo sapiens
ttgtaaatgagtacaaatgaatacaycagttggagtacgtgtggaatagca

SEQ ID NO: 925 - DNA, 51 bp, Homo sapiens
ctgacggacactgtgtctgttgggcraggcggattggccatttcttatagc

SEQ ID NO: 926 - DNA, 51 bp, Homo sapiens
ttcaccctgagcccgatacatgaccyggaactgctgtgagcaaatccctct

SEQ ID NO: 927 - DNA, 51 bp, Homo sapiens
ttggtgacctcaattgaaactgaacycttaaaaatgatttgtctcaaaaca

SEQ ID NO: 928 - DNA, 51 bp, Homo sapiens
ataattaaaggaaccttattaggacmatgtggctttattgttacagctgtc

SEQ ID NO: 929 - DNA, 51 bp, Homo sapiens
cgaaaagactgattccatggtcatasgtttgaggttatttgttcttaagaa

SEQ ID NO: 930 - DNA, 51 bp, Homo sapiens
agacaataaagtgggacataatattmaaaatcacatcattgaatgcaagca

SEQ ID NO: 931 - DNA, 51 bp, Homo sapiens
aactgtattttcacagtacttctggrattcttaatgaactagaaacttaat

SEQ ID NO: 932 - DNA, 51 bp, Homo sapiens
atgatatctatatgagagatttaatraagtgttaaggtatgctgggttcat

SEQ ID NO: 933 - DNA, 51 bp, Homo sapiens
ttctctatcactgatgccaaggacayggtcttttctttatagaggatggca

SEQ ID NO: 934 - DNA, 51 bp, Homo sapiens
aaatgaccctgtttcttgaacaaatwagtagcatttaaaagaggaaagaga

SEQ ID NO: 935 - DNA, 51 bp, Homo sapiens
tagtcatagcttcatgggcctattaygtgtaaattagaaacacattattcc

SEQ ID NO: 936 - DNA, 51 bp, Homo sapiens
tatgttaggatagcaatatgcttgasaattttaaacaaaccagtgaggcag

SEQ ID NO: 937 - DNA, 51 bp, Homo sapiens
ctctctcgaaagggtgctcgctcacyattccttagtctattgcccacacac

SEQ ID NO: 938 - DNA, 51 bp, Homo sapiens
tgaataacagagtctttgtccttacrgagtttgtggtctagttagggagag

SEQ ID NO: 939 - DNA, 51 bp, Homo sapiens
aaatatttaaaaatgcttcatgtgaygttacttaggggtaagattaagtgg

SEQ ID NO: 940 - DNA, 51 bp, Homo sapiens
aactgagacttacttaatacagtccrgcaaagcagaactggataaaagcct

SEQ ID NO: 941 - DNA, 51 bp, Homo sapiens
tatcttgcttggcattccataacatsactccttttgttctgtgtatgactt

SEQ ID NO: 942 - DNA, 51 bp, Homo sapiens
caaataaaacactgaggctgagacasattaagtaacctgcccaggtcccag

SEQ ID NO: 943 - DNA, 51 bp, Homo sapiens
tatccaactaaaatcatatttgaaartggtccaggaatccccaaataactt

SEQ ID NO: 944 - DNA, 51 bp, Homo sapiens
gagcagtctaaatattagaacagaaytattatttactgctgatatgattgt

SEQ ID NO: 945 - DNA, 51 bp, Homo sapiens
tgccgggcatcatcccatttaatccyaataaaactatcataggaaatttca

SEQ ID NO: 946 - DNA, 51 bp, Homo sapiens
tatctcgtggtcatgttggggccttraaactacttctggccaatgaactct

SEQ ID NO: 947 - DNA, 51 bp, Homo sapiens
caaaagacaattaacagatgacaacwctaagattatatggaagttaacatt

SEQ ID NO: 948 - DNA, 51 bp, Homo sapiens
tgtggtgtgggtctgactgtcttcaygtggcactgcagaaagggaggcccc

SEQ ID NO: 949 - DNA, 51 bp, Homo sapiens
aagctgtcaaggagataatagatagyaagctcttcgaaggcagacatttaa

SEQ ID NO: 950 - DNA, 51 bp, Homo sapiens
tccctggagagtacagggaaaccaaytgttgtgcttagctcaagttaagta

SEQ ID NO: 951 - DNA, 51 bp, Homo sapiens
tgacatttttaaatggatgctttaaraggaaaataggcagtagaaattgtg

SEQ ID NO: 952 - DNA, 51 bp, Homo sapiens
gaagtctgcattatttctcctatcayacactttggtcccaagtattattga

SEQ ID NO: 953 - DNA, 51 bp, Homo sapiens
acactgtttactgtacttcaaagcayctttaatattaggaaacagctctgg

SEQ ID NO: 954 - DNA, 51 bp, Homo sapiens
tctccaattatggggcaccatattgrattaagagttatgtgtatttattag

SEQ ID NO: 955 - DNA, 51 bp, Homo sapiens
cacaggtgccctttctgggcatataraactggcattgattaaggatgtatc

SEQ ID NO: 956 - DNA, 51 bp, Homo sapiens
gtgatctctaaaatcttgcctatgakgaggtccaacatttgcaattttgtg

SEQ ID NO: 957 - DNA, 51 bp, Homo sapiens
gacataatcaacctgtactaagagargccaggagagtatctatgggcctgg

SEQ ID NO: 958 - DNA, 51 bp, Homo sapiens
agagggacacaatggaatgatccacygtatgtaattggagttccagagaat

SEQ ID NO: 959 - DNA, 51 bp, Homo sapiens
ctgctaaacacatgcataaagttcckaatttcagctattctatttttcagt

SEQ ID NO: 960 - DNA, 51 bp, Homo sapiens
atgttttgtttttcatcattgctcamtatttagtaataggttaatcaaaat

SEQ ID NO: 961 - DNA, 51 bp, Homo sapiens
agagcccagctgtttggcttactacrcttttccatgaggaattgaaacatg

SEQ ID NO: 962 - DNA, 51 bp, Homo sapiens
ttccaagttttttttccaattccaaygtggcctgatttcaagttcccccag

SEQ ID NO: 963 - DNA, 51 bp, Homo sapiens
tttctctggaaacttcttatttgatycatgtgttacttagaagtttttttt

SEQ ID NO: 964 - DNA, 51 bp, Homo sapiens
gaaaggcaggttgttgcatttatctrtcaattattatagtgtgtttttctc

SEQ ID NO: 965 - DNA, 51 bp, Homo sapiens
aactgaggactaggccctgcttcacrggcaatgaacagtggggcacacacg

SEQ ID NO: 966 - DNA, 51 bp, Homo sapiens
aaatagaaataaaacaaggacattayctacactcacatagccaaggttaat

SEQ ID NO: 967 - DNA, 51 bp, Homo sapiens
ctttcataaaattgaagagatgagartagttcataattcattgtatgaggc

SEQ ID NO: 968 - DNA, 51 bp, Homo sapiens
tgcttaataaccttcctaacattcgrcattatttctactttctagccagaa

SEQ ID NO: 969 - DNA, 51 bp, Homo sapiens
cattaccctgttcctggacagaagargacttaccagcttccaaagcggcca

SEQ ID NO: 970 - DNA, 51 bp, Homo sapiens
ttttggcaaaatacatgaacttataracccaagagactaagggaagcctaa

SEQ ID NO: 971 - DNA, 51 bp, Homo sapiens
tcttaatcaaaaatggtggttgtatyagtgttctagggctggtgttccatt

SEQ ID NO: 972 - DNA, 51 bp, Homo sapiens
aatcaacatataatgggttagaaacmaaaattaatgcttgtcttccaaatc

SEQ ID NO: 973 - DNA, 51 bp, Homo sapiens
acttgtaagatcttaaacaatttaaycaaagttctaagccctaacttgctc

SEQ ID NO: 974 - DNA, 51 bp, Homo sapiens
agaaaatgttggtacaaatatagagyaaggagcatttcaacactatgtgtg

SEQ ID NO: 975 - DNA, 51 bp, Homo sapiens
aaatctggcattagcttccttctaawtgatgataattagacaaactatttt

SEQ ID NO: 976 - DNA, 51 bp, Homo sapiens
cctttatagggacgatcctaatgtcrgaagttacccatgaagagaacacat

SEQ ID NO: 977 - DNA, 51 bp, Homo sapiens
tttttgtaggtattttagtaacacgmatctgttgaggtcctggagaggata

SEQ ID NO: 978 - DNA, 51 bp, Homo sapiens
atcattatatcattccctgtttgtastaacaacttaactaaattattacga

SEQ ID NO: 979 - DNA, 51 bp, Homo sapiens
tgggtaccataccaatattcttgaargcaccagtagttgaacacattgaga

SEQ ID NO: 980 - DNA, 51 bp, Homo sapiens
gtaaccaagcaaaccaaactcgacartgaaaagagatgcctctgtgatgtg

SEQ ID NO: 981 - DNA, 51 bp, Homo sapiens
tatttaatttgttataatcctagtayctagagttgtgtcatattagctctt

SEQ ID NO: 982 - DNA, 51 bp, Homo sapiens
caacatacaaaagcgggaacaccatraaactgtctcttaaaaaacataaaa

SEQ ID NO: 983 - DNA, 51 bp, Homo sapiens
atatttattcaggaaccttacagaartctacaaaatagcttgttttggatg

SEQ ID NO: 984 - DNA, 51 bp, Homo sapiens
ctcaagaagttgatcaaaatttgcarcactcatgtgggtcctatgaagtct

SEQ ID NO: 985 - DNA, 51 bp, Homo sapiens
ataagagatctaaaaatataatgtgkcccacagcagccctgacttcagtca

SEQ ID NO: 986 - DNA, 51 bp, Homo sapiens
ctagtggttgatgctataagaattarataagataatgtatgtcaagtactt

SEQ ID NO: 987 - DNA, 51 bp, Homo sapiens
aaaggatcctggctgtctcagacacratagtttcctctggagacttgatag

SEQ ID NO: 988 - DNA, 51 bp, Homo sapiens
agggccagaaatagacagcagtgaawctaatggtcagtaaacatggggaaa

SEQ ID NO: 989 - DNA, 51 bp, Homo sapiens
ctagatgtgtagcttctaactttgaraatttgattggagaactacaggaat

SEQ ID NO: 990 - DNA, 51 bp, Homo sapiens
taaatacatttgtttaatatgctaayctaggtgaatttcagtttgttttca

SEQ ID NO: 991 - DNA, 51 bp, Homo sapiens
ccttcctctaagaattgacctgagaygacttatttctacacagctcatcaa

SEQ ID NO: 992 - DNA, 51 bp, Homo sapiens
aatcaagattaagaatccaaacataytaaagtgagaattgggagttatttt

SEQ ID NO: 993 - DNA, 51 bp, Homo sapiens
gagggaatttgatataacttatgacragggcttggtaacacacaacccctg

SEQ ID NO: 994 - DNA, 51 bp, Homo sapiens
gtgagactgtgtcaaaattatcttaygtaaataatgcaacaaatatataaa

SEQ ID NO: 995 - DNA, 51 bp, Homo sapiens
tctactcagaacaataatttagatcyaattggctgagtgcagtggctcaca

SEQ ID NO: 996 - DNA, 51 bp, Homo sapiens
gaaattcttcatcaggactgtccaayagaacttctgaagcaataaaaattt

SEQ ID NO: 997 - DNA, 51 bp, Homo sapiens
ttttgctttttggaactttgtgagaytatttttcctaatacttctatccat

SEQ ID NO: 998 - DNA, 51 bp, Homo sapiens
gatcctccattctctttccttaatayagcctgttgtgacttcatagtactg

SEQ ID NO: 999 - DNA, 51 bp, Homo sapiens
gaaaagtcatagaggtagaatccacygactctaactttataacaataaaca

SEQ ID NO: 1000 - DNA, 51 bp, Homo sapiens
aaaaaaaaacaccttaggtacatgamattctcctaaggataaccagtatat

SEQ ID NO: 1001 - DNA, 51 bp, Homo sapiens
taaagaaacaatttgcttatttggcyctatatacatgtatacaacaggtat

SEQ ID NO: 1002 - DNA, 51 bp, Homo sapiens
tcatctcttattcaaatttttagaawcgttcatagtagattcggactatca

SEQ ID NO: 1003 - DNA, 51 bp, Homo sapiens
aatcaacattctaattctgtaaccascacaattaattttatgtttgataat

SEQ ID NO: 1004 - DNA, 51 bp, Homo sapiens
aaagacacataaagttcatgtgttaraagaagcaatattgttaaaatgtcc

SEQ ID NO: 1005 - DNA, 51 bp, Homo sapiens
ctttgtaattagtccctttgcaaatraacactctacaaattttccaagatt

SEQ ID NO: 1006 - DNA, 51 bp, Homo sapiens
ctaatatgtcagcaggagagccaaasactagcgtatgaaacagcaaaacaa

SEQ ID NO: 1007 - DNA, 51 bp, Homo sapiens
ttccctcttctgcctttcttggtgayagtcctcactacttgttatgagatg

SEQ ID NO: 1008 - DNA, 51 bp, Homo sapiens
caaggtatgattggaattaacgcaarctgcaccgacttacaaatggcagta

SEQ ID NO: 1009 - DNA, 51 bp, Homo sapiens
cctgacacagggttttgccagcagastcatttttcagcccagccctaaaag

SEQ ID NO: 1010 - DNA, 51 bp, Homo sapiens
atgcagctgcttctgtggctcacacscagacacggaggggtcaagcagcag

SEQ ID NO: 1011 - DNA, 51 bp, Homo sapiens
ggtgtcccgccccttgggacagtgcrataccagattcctcactacttctac

SEQ ID NO: 1012 - DNA, 51 bp, Homo sapiens
gatacttaggttgcttccctggcackgctgtttctgtgaacgatcccattg

SEQ ID NO: 1013 - DNA, 51 bp, Homo sapiens
gggccaggtgggaatttctgcatctsacgtcccttgtcctggaaaggtcca

SEQ ID NO: 1014 - DNA, 51 bp, Homo sapiens
ctgttcaacctgattttgactctgakagaattaaacctgcccctcaaatga

SEQ ID NO: 1015 - DNA, 51 bp, Homo sapiens
aatgcaatctcagtaaagagtgaacscggtgacagtttaaagtgctccctc

SEQ ID NO: 1016 - DNA, 51 bp, Homo sapiens
gcatcgtgctgttcgtttgcaaagtsaccaacaaatttgtattttaaccca

SEQ ID NO: 1017 - DNA, 51 bp, Homo sapiens
ttagcaaagtacagctcaatctaaaygatgcattggaaaggaaactccaca

SEQ ID NO: 1018 - DNA, 51 bp, Homo sapiens
actttcctttagggatgctaggatartacaactctgcaaattataaggtac

SEQ ID NO: 1019 - DNA, 51 bp, Homo sapiens
ttcaagtaaacagattcaactaacargtatatgatgagcacctactatgtg

SEQ ID NO: 1020 - DNA, 51 bp, Homo sapiens
agatgcagggacagcagcctcgaccraagaaactggatgaggaaaggtatg

SEQ ID NO: 1021 - DNA, 51 bp, Homo sapiens
tgagcaaaatggatatagtgggttargtttgctcgaaaatggatagtgtgt

SEQ ID NO: 1022 - DNA, 51 bp, Homo sapiens
cactaacctgaggccacatgactaawtgaggttccactgcaggtccctgat

SEQ ID NO: 1023 - DNA, 51 bp, Homo sapiens
gaacaagtcagactcctttgtgtaaytgcttgatgaaacattcctgtccat

SEQ ID NO: 1024 - DNA, 51 bp, Homo sapiens
ctcttcttatcactttaacaaagaasgcgaggagacagcctctctccaagc

SEQ ID NO: 1025 - DNA, 51 bp, Homo sapiens
accagtttgttgttagaacaatggasacactttctagggattgctgtttct

SEQ ID NO: 1026 - DNA, 51 bp, Homo sapiens
tacatacggctttcttcatctgtccyatggataaaaggccagccagagagg

SEQ ID NO: 1027 - DNA, 51 bp, Homo sapiens
agaaacattacagctggggagattcracattcccaatatatagattccatt

SEQ ID NO: 1028 - DNA, 51 bp, Homo sapiens
tcctctccctgaaataagaaataccrgcttctgtttatggaacttgtgggc

SEQ ID NO: 1029 - DNA, 51 bp, Homo sapiens
acttattagctgtatgattttgagcrattgactttacttattgtgcctcag

SEQ ID NO: 1030 - DNA, 51 bp, Homo sapiens
atatagaaagagccatagttagcagyaagataaacaggatgggggtgctaa

SEQ ID NO: 1031 - DNA, 51 bp, Homo sapiens
ggactctctggcacagaggaacattktccaactctttggaattacaaagca

SEQ ID NO: 1032 - DNA, 51 bp, Homo sapiens
tatacttaccttctctgaaatctgasaaacagcccactcaaaaacacagct

SEQ ID NO: 1033 - DNA, 51 bp, Homo sapiens
attaagtctaatttttagtttttaaygtatgagcgtttctgtcactttgct

SEQ ID NO: 1034 - DNA, 51 bp, Homo sapiens
gtgcatctttccttcccaactgtacygagattttgaattttttataatttg

SEQ ID NO: 1035 - DNA, 51 bp, Homo sapiens
tcactggaacttcatccacaattacmatgtcttggtggctttctaagtttt

SEQ ID NO: 1036 - DNA, 51 bp, Homo sapiens
atcattttcttctcatacaaggagamctggcattttgttttgggggtagga

SEQ ID NO: 1037 - DNA, 51 bp, Homo sapiens
actatagagaaaattaaacagtgacyggaagagcttgtattttaggcagtg

SEQ ID NO: 1038 - DNA, 51 bp, Homo sapiens
ccaagaaggttttttccactgtgaargccttgggcacacataaacattgtc

SEQ ID NO: 1039 - DNA, 51 bp, Homo sapiens
aacatattttaccagtgaaaataatraaacaatcatgtgctggatcctaat

SEQ ID NO: 1040 - DNA, 51 bp, Homo sapiens
atcgattcattctctcagcttactayaacactcaaccatggaaattcttat

SEQ ID NO: 1041 - DNA, 51 bp, Homo sapiens
cctttcatgttaaaaactctcaatgwaataagtattaaaggaacatatggc

SEQ ID NO: 1042 - DNA, 51 bp, Homo sapiens
cgacattgccacaagtagtactaagraagataaagaaagactttaataatt

SEQ ID NO: 1043 - DNA, 51 bp, Homo sapiens
taaacttaaaatatctagcctaagawtatattggttttatgacaatttaca

SEQ ID NO: 1044 - DNA, 51 bp, Homo sapiens
tgaagcataagtcactacctgttatyaagttaagcaactagaaaggagtcc

SEQ ID NO: 1045 - DNA, 51 bp, Homo sapiens
tctaaacactgtgcagcaggtaccaytcttatttctatttgagagttgaga

SEQ ID NO: 1046 - DNA, 51 bp, Homo sapiens
ttatgttcttgaaatctacctaaacrttcattgccaagagtaaataattta

SEQ ID NO: 1047 - DNA, 51 bp, Homo sapiens
aaaatgaaaggtaatagatacatgcrcagaaggcaaaaaaaactgatggaa

SEQ ID NO: 1048 - DNA, 51 bp, Homo sapiens
aatttatttttcctacctcttaatarctatcacagttgttcagtaatagtt

SEQ ID NO: 1049 - DNA, 51 bp, Homo sapiens
aagatctattttagtcttcaacttaygggtctctttgggcctcagtgactt

SEQ ID NO: 1050 - DNA, 51 bp, Homo sapiens
caaggcagctggagagaaaccatgaygatacatacaacagagagagaaata

SEQ ID NO: 1051 - DNA, 51 bp, Homo sapiens
agtagggctagggtctacacgaggargtatcagagaaagaaatgggttatt

SEQ ID NO: 1052 - DNA, 51 bp, Homo sapiens
catgatttgctctgtcattttcagarctaccaggaatacatagcgttgaat

SEQ ID NO: 1053 - DNA, 51 bp, Homo sapiens
tctgtatatgatgaatacatttttayacactaacattagcattaacaggtg

SEQ ID NO: 1054 - DNA, 51 bp, Homo sapiens
tttctgctgtgatatttttggattcsaattatgcttatagcttttgaggct

SEQ ID NO: 1055 - DNA, 51 bp, Homo sapiens
tgatagagattttgcattgatctccrctgagcctttaaactctaaatatat

SEQ ID NO: 1056 - DNA, 51 bp, Homo sapiens
atagaaaacctgacccaataaggaargtaatacaataaggaaagttataga

SEQ ID NO: 1057 - DNA, 51 bp, Homo sapiens
cgagggtaggagggtaggagtctgayattgagtcaagggtgagtgtgaaag

SEQ ID NO: 1058 - DNA, 51 bp, Homo sapiens
ggagaaaaagcaaagtactccaatgmagcctagaggaaggcctgccccacc

SEQ ID NO: 1059 - DNA, 51 bp, Homo sapiens
tcaaagataaaaatcagatttaaccsggtcatgaataaagtaatgaagatg

SEQ ID NO: 1060 - DNA, 51 bp, Homo sapiens
catcagcaacattttaagagtaaaaytggtgattaatggtgcaagtttgct

SEQ ID NO: 1061 - DNA, 51 bp, Homo sapiens
tcttaactttttctattatcttttaygttttcctgaatgtcttctaattac

SEQ ID NO: 1062 - DNA, 51 bp, Homo sapiens
cctgactctgtaccttgaaagtcaamtgagagttctatgatttccctctaa

SEQ ID NO: 1063 - DNA, 51 bp, Homo sapiens
ctctctaggattactactgagattawcattctggagtctagaatgtacaag

SEQ ID NO: 1064 - DNA, 51 bp, Homo sapiens
tgcaatggaaaacactggttaaagcmctactggagaagttcactcacgtaa

SEQ ID NO: 1065 - DNA, 51 bp, Homo sapiens
aatatgtcattatgagagtaaaacaraaacctacagagaggggaatgaatt

SEQ ID NO: 1066 - DNA, 51 bp, Homo sapiens
ggagactgcccctcacacactagatsagatgaagtctatgttcctggctgg

SEQ ID NO: 1067 - DNA, 51 bp, Homo sapiens
caataactgtattattatgattacasagttcataccctcgctctgttcttc

SEQ ID NO: 1068 - DNA, 51 bp, Homo sapiens
tgacctctccttctctgtgaaaaccrgggtatccttgctggtgtccagctg

SEQ ID NO: 1069 - DNA, 51 bp, Homo sapiens
agagaaaaagtgaacattacttacaytcaatacataggttggctctgcaca

SEQ ID NO: 1070 - DNA, 51 bp, Homo sapiens
acttggatgcagttgagctcgtgccrcaaaatttggaaggattataaaaac

SEQ ID NO: 1071 - DNA, 51 bp, Homo sapiens
gtcttcactgaggtggactgtccaayaactatccctttcaaacatcagcca

SEQ ID NO: 1072 - DNA, 51 bp, Homo sapiens
tattttcagtgttttcatatgtgacrgtaaaacaagagaaagcccaacaaa

SEQ ID NO: 1073 - DNA, 51 bp, Homo sapiens
ggaagagttattaatggaatcaggaratagaaacttatatggtacaatgca

SEQ ID NO: 1074 - DNA, 51 bp, Homo sapiens
acaccaaatcctgcttactgcctcaraagattttaagtgggagagacaagt

SEQ ID NO: 1075 - DNA, 51 bp, Homo sapiens
gaggtccaaagatgaaaatgttgtaycctagtgaaggtgatgggcttgcag

SEQ ID NO: 1076 - DNA, 51 bp, Homo sapiens
aatgtttacataagagattatttccrgatgtaagaattagaggggaatttt

SEQ ID NO: 1077 - DNA, 51 bp, Homo sapiens
atccctggtaccctcatctttgctcyacgctactttcttacaaaagcaagt

SEQ ID NO: 1078 - DNA, 51 bp, Homo sapiens
ttcactaatcttatctggatcaacaygtgagattagctacctcgcatagag

SEQ ID NO: 1079 - DNA, 51 bp, Homo sapiens
aggatgggatgccctttgattagatraggaagccacagagctgaattttgt

SEQ ID NO: 1080 - DNA, 51 bp, Homo sapiens
aaaatctagctataatattttagtcyctgcatcacagttagggtacttaag

SEQ ID NO: 1081 - DNA, 51 bp, Homo sapiens
acatgcactcactctcctgcctttawcacagacagtgaacccagatctata

SEQ ID NO: 1082 - DNA, 51 bp, Homo sapiens
gacagaaaccttttccacaacacacwattaggattaagtccactctttttc

SEQ ID NO: 1083 - DNA, 51 bp, Homo sapiens
gccataaaaccccaaaatcattgacwcttacacttccacatttctgccttc

SEQ ID NO: 1084 - DNA, 51 bp, Homo sapiens
cacgatactacaattgcctctcaagraccctctgttgcatttctacagcct

SEQ ID NO: 1085 - DNA, 51 bp, Homo sapiens
tgcagggaatagtgtttctccacgayactacaattgcctctcaagaaccct

SEQ ID NO: 1086 - DNA, 51 bp, Homo sapiens
atttctagatacaaaagaatgactcrgaggcccaaaagtgtaaaaggagta

SEQ ID NO: 1087 - DNA, 51 bp, Homo sapiens
ttttctctgataaggagaccacacaytataaagcaatcacccatgacacta

SEQ ID NO: 1088 - DNA, 51 bp, Homo sapiens
ctaactataaaataatgagataaacratgtctcttacttgaatagattggc

SEQ ID NO: 1089 - DNA, 51 bp, Homo sapiens
acctacagctgcaaaatcagtgagaygggaaagatgttttgcaattttcaa

SEQ ID NO: 1090 - DNA, 51 bp, Homo sapiens
acttttgtttccacatctgtacatgycatgggaaaatttaaaaagatatat

SEQ ID NO: 1091 - DNA, 51 bp, Homo sapiens
atatagagtgggtgatggtccttaaytaggagaaaataacccagagattcc

SEQ ID NO: 1092 - DNA, 51 bp, Homo sapiens
ttttcacaataatttcactgtaggcrataccttcctgtctttccagaaatt

SEQ ID NO: 1093 - DNA, 51 bp, Homo sapiens
gtattgtatctattagaggttatagyccattgcactgtaagcttttccaag

SEQ ID NO: 1094 - DNA, 51 bp, Homo sapiens
tgcctttggcaatataaaccttaaaygctcatgaaggcctcacatgagtta

SEQ ID NO: 1095 - DNA, 51 bp, Homo sapiens
taagaaacttttaaagtgtgagtaawtgataattaaaggttataaatcttt

SEQ ID NO: 1096 - DNA, 51 bp, Homo sapiens
gtatacctatgtaacaaaccagcacraagttttgcatgtgtatcctggaac

SEQ ID NO: 1097 - DNA, 51 bp, Homo sapiens
agtaggtgagatatggacgcatgtgwagataaagattcaggtggctgggca

SEQ ID NO: 1098 - DNA, 51 bp, Homo sapiens
ttaagagaaaaatatagttaaatagyctatggtaaacaactggatcccaat

SEQ ID NO: 1099 - DNA, 51 bp, Homo sapiens
agactgggagattaaaagtgctaaayatgcatgacttgactaataactaag

SEQ ID NO: 1100 - DNA, 51 bp, Homo sapiens
tcaatgattctttagcgatatctaawctaattccctcttttacatattagg

SEQ ID NO: 1101 - DNA, 51 bp, Homo sapiens
aataaggcagactgacaaagatatayggaggtctaagttaggaaggaagtg

SEQ ID NO: 1102 - DNA, 51 bp, Homo sapiens
gagatttacatggaatacatttttcraagttctaatcccttagtagtataa

SEQ ID NO: 1103 - DNA, 51 bp, Homo sapiens
tactttggggttcccagctttcctartaagtctcttcaactctgagttatt

SEQ ID NO: 1104 - DNA, 51 bp, Homo sapiens
ctcccaaggcagaccaaccatacagmccatactctttactactacagtgat

SEQ ID NO: 1105 - DNA, 51 bp, Homo sapiens
taaagttatttacttccttctaggascaagctgtgatttcagtaactgcca

SEQ ID NO: 1106 - DNA, 51 bp, Homo sapiens
catatttttcatccccaaatcactckataaggtttctacttaattcttctg

SEQ ID NO: 1107 - DNA, 51 bp, Homo sapiens
ctggaaataaactggcttaataccaygtgcctaggatttgtggtacaaaga

SEQ ID NO: 1108 - DNA, 51 bp, Homo sapiens
agcgtttcatgttgtcttacctctaygaggctccattggtctctgtcccct

SEQ ID NO: 1109 - DNA, 51 bp, Homo sapiens
tccttttctctcatagcactctccaygaatctatcttgaccctcaaaccac

SEQ ID NO: 1110 - DNA, 51 bp, Homo sapiens
ctccctatcaatttgaaagagggtcraagaaatgtaacacaataatggacg

SEQ ID NO: 1111 - DNA, 51 bp, Homo sapiens
tataaaaatataaaaagctattcatytgaaaacttgaacaaaactaatatc

SEQ ID NO: 1112 - DNA, 51 bp, Homo sapiens
agactaatccacaaactggataaggycattaagaatccactcatcatcact

SEQ ID NO: 1113 - DNA, 51 bp, Homo sapiens
agagctcattacagacaagtattggrcaagacatttaaagagtagaataac

SEQ ID NO: 1114 - DNA, 51 bp, Homo sapiens
cataacaagccactccaaaacataayggctaaagccacaaaaatttactat

SEQ ID NO: 1115 - DNA, 51 bp, Homo sapiens
taccagtgttacatacaatataaacmggaaatatgcacgtcaaaataataa

SEQ ID NO: 1116 - DNA, 51 bp, Homo sapiens
aatttctgacctaggactctcctcamaagtatggtatgacccaagtatgat

SEQ ID NO: 1117 - DNA, 51 bp, Homo sapiens
agatacagttgtccttgccattttcmagatattacccactgtctttgtatt

SEQ ID NO: 1118 - DNA, 51 bp, Homo sapiens
tgaagagtttgtttcttttttgttasatggagagaatgagaatgtggcaaa

SEQ ID NO: 1119 - DNA, 51 bp, Homo sapiens
ttggtagctggtgctgagagaaaacscttgattgcatccttgccctgggac

SEQ ID NO: 1120 - DNA, 51 bp, Homo sapiens
gctccacttcaggttgtctggccacsgtacaagtatggagaggaccgatcc

SEQ ID NO: 1121 - DNA, 51 bp, Homo sapiens
tgtctcttcaaattctataagcaaayggatcttataataatgttgcaatta

SEQ ID NO: 1122 - DNA, 51 bp, Homo sapiens
gggaacgagggacacaaaggtctatragatgtcatccctgtctttgtgggg

SEQ ID NO: 1123 - DNA, 51 bp, Homo sapiens
agtctaagcttgtgttttggctacakaaattaagttacaaaaacagtgcta

SEQ ID NO: 1124 - DNA, 51 bp, Homo sapiens
gtaattttgttagaaatatggagtayacattctgctgctgtatccccttgc

SEQ ID NO: 1125 - DNA, 51 bp, Homo sapiens
atgtgtactccatatttctaacaaarttacaattctgaatctctgttaggt

SEQ ID NO: 1126 - DNA, 51 bp, Homo sapiens
gagttcctaaaaacactaatccatgmattttactctttctttaccctctgt

SEQ ID NO: 1127 - DNA, 51 bp, Homo sapiens
tatcatgcattagtacctagactgcraatatattgtattacaaagtaaaag

SEQ ID NO: 1128 - DNA, 51 bp, Homo sapiens
taaaagccaaaagaagaccctcaccrgatatagctcctcgatcttggactt

SEQ ID NO: 1129 - DNA, 51 bp, Homo sapiens
aagtaaactaagttgagattaaggasaactacagtataagactgtgtaagg

SEQ ID NO: 1130 - DNA, 51 bp, Homo sapiens
ccagactcagtccagattggatccascatcaagttagtgtagaaaaaccca

SEQ ID NO: 1131 - DNA, 51 bp, Homo sapiens
gaacttcttaattatcatcaaacccyctatggtaacagcacatgcttatga

SEQ ID NO: 1132 - DNA, 51 bp, Homo sapiens
atgtcacatagctatcttgaaaaaamaagcttcgtgttctataggtaagtc

SEQ ID NO: 1133 - DNA, 51 bp, Homo sapiens
ccattttgtatcaggaatatcaaggwcattggaaatccttacatctggatt

SEQ ID NO: 1134 - DNA, 51 bp, Homo sapiens
aattacaaataaaaaaaaaatcatcygaacataaagttttcgcctcaaggg

SEQ ID NO: 1135 - DNA, 51 bp, Homo sapiens
atatatggtcttgatttggcaagtckaagtggaaatgacgttactgtttcc

SEQ ID NO: 1136 - DNA, 51 bp, Homo sapiens
tacttacatttgatatttcatcaccsaattatatatttagggagttatttt

SEQ ID NO: 1137 - DNA, 51 bp, Homo sapiens
ctaagaaaagacagggagttaggaaygcatgggtctctttatggactaagc

SEQ ID NO: 1138 - DNA, 51 bp, Homo sapiens
ccatttcttcaattgcttgaaagaaytaaagagtcagacatgacaaactgc

SEQ ID NO: 1139 - DNA, 51 bp, Homo sapiens
ctctagaaatcatagaagaaacaaargaaagctgttttcatagactggaat

SEQ ID NO: 1140 - DNA, 51 bp, Homo sapiens
ggctggagagaaggggtagaaaggcyagagaaatgttgaaataatttaagt

SEQ ID NO: 1141 - DNA, 51 bp, Homo sapiens
cctgccttcgaggagttaaaaatcartacaacacaaaatgagataatgtta

SEQ ID NO: 1142 - DNA, 51 bp, Homo sapiens
ttatgcagatataatgatgaagtcastaaataacatgcaatttaattatat

SEQ ID NO: 1143 - DNA, 51 bp, Homo sapiens
ccaaagttacagataaagatagggargatgaaacacagacagtccagtccc

SEQ ID NO: 1144 - DNA, 51 bp, Homo sapiens
tatcccaaaattgtacactagaagayatgaaggacacaagcgtgaacttac

SEQ ID NO: 1145 - DNA, 51 bp, Homo sapiens
tctatttattccatttataggctccmatgatgcctggtaaagatctccaaa

SEQ ID NO: 1146 - DNA, 51 bp, Homo sapiens
tctacatgattatagtttgtagataytaaggctatggattttttgataact

SEQ ID NO: 1147 - DNA, 51 bp, Homo sapiens
attatccattcaatttcatacatgcrataacacaaatgtatttttgtgaga

SEQ ID NO: 1148 - DNA, 51 bp, Homo sapiens
acatttttatttcattgcctccttaygcaaaccaggtgcacacagatatgt

SEQ ID NO: 1149 - DNA, 51 bp, Homo sapiens
tggattagttatttgttgggtctagsaaccagtgcagagttgcaattataa

SEQ ID NO: 1150 - DNA, 51 bp, Homo sapiens
ttgatttctataatttggctttcaasatgacaatcagatctactattgtta

SEQ ID NO: 1151 - DNA, 51 bp, Homo sapiens
tgctcaatacgtgttcatttgataaytgaataagctcctgcttaaggtaaa

SEQ ID NO: 1152 - DNA, 51 bp, Homo sapiens
gaatggattcagctgtgctatcaatratgaaaaagaattgtagggagaagt

SEQ ID NO: 1153 - DNA, 51 bp, Homo sapiens
taaaagagctagaagaagcaaagaayacggagcaatgttgagacgcctgtc

SEQ ID NO: 1154 - DNA, 51 bp, Homo sapiens
atttaaaaacaaagacaacaactggstacatggcctgaacgtccctgcaga

SEQ ID NO: 1155 - DNA, 51 bp, Homo sapiens
ttccacaaaagagtccatctctggcmaaagaagtaccagatctatgttttt

SEQ ID NO: 1156 - DNA, 51 bp, Homo sapiens
attagtcttttttccacctatgttayaaatacagatttaaggctattttgt

SEQ ID NO: 1157 - DNA, 51 bp, Homo sapiens
aattaaataatttattcaaagccaayctgcacattagcatcagatctgggg

SEQ ID NO: 1158 - DNA, 51 bp, Homo sapiens
gatctggggctgaaaacaaagtttcrgcatcacttatctagcattctttca

SEQ ID NO: 1159 - DNA, 51 bp, Homo sapiens
aggtactatctcatctaatccttacycaaagcacaagggggaatagctgac

SEQ ID NO: 1160 - DNA, 51 bp, Homo sapiens
aaaacacattttggagtagctatgayggactatggttaatctaaagaaact

SEQ ID NO: 1161 - DNA, 51 bp, Homo sapiens
gctaatattagatggcatactaggayggaagttaaagtaattcatcctaag

SEQ ID NO: 1162 - DNA, 51 bp, Homo sapiens
actgtctaatctagaccctgaatacygaaaaggctctctccctgacctgac

SEQ ID NO: 1163 - DNA, 51 bp, Homo sapiens
tagctcaaagatctactggaaaaccmgaacttttagagctagaacatgcca

SEQ ID NO: 1164 - DNA, 51 bp, Homo sapiens
atgccacgtgatccttcaccaaactkagttataatctcgggaaaacaaact

SEQ ID NO: 1165 - DNA, 51 bp, Homo sapiens
cgatgtgtcatacagagacggaagasaggaatcggggaaaagggagaggga

SEQ ID NO: 1166 - DNA, 51 bp, Homo sapiens
taggatcagtctcaaattcttgagayaaattcattaattcaccggctcatt

SEQ ID NO: 1167 - DNA, 51 bp, Homo sapiens
tcttaaatttgtctgaagatattatsataaaaataaactatcttgccatgt

SEQ ID NO: 1168 - DNA, 51 bp, Homo sapiens
ctgactggctaactcttgtcccatawaataactcttaattacttgtgggag

SEQ ID NO: 1169 - DNA, 51 bp, Homo sapiens
tattaatcattttgaatagaaaatargtgacgtaagatgttggcagctgca

SEQ ID NO: 1170 - DNA, 51 bp, Homo sapiens
tctctagagtactgagctataaacascggagaaggacaatatgcagcccac

SEQ ID NO: 1171 - DNA, 51 bp, Homo sapiens
agaatcaacaggatgtgtgtatatayagaaggagatttattataaggaatt

SEQ ID NO: 1172 - DNA, 51 bp, Homo sapiens
attattattattatgtattgtcttcrcttctatctggtgtacaactccctt

SEQ ID NO: 1173 - DNA, 51 bp, Homo sapiens
tgtagcaaagggggaaagaaagtcartatgaagcattattaatcacaaatt

SEQ ID NO: 1174 - DNA, 51 bp, Homo sapiens
tttgcttttacaatgaattagacagmattatccctataatgctgtttggtg

SEQ ID NO: 1175 - DNA, 51 bp, Homo sapiens
ataatcagggtttgtttttgttgtckaaacatcactaaggtaaaaaacctg

SEQ ID NO: 1176 - DNA, 51 bp, Homo sapiens
tggttaagtagttcattattttaccrggaaatagagtctgtaaataaatac

SEQ ID NO: 1177 - DNA, 51 bp, Homo sapiens
taataatatgtattgttttaaagacmagctctgagtcaaactgcctgagtt

SEQ ID NO: 1178 - DNA, 51 bp, Homo sapiens
gtagcatgtctttcatttggatgtasaatgatgtgcaaggtaagactggta

SEQ ID NO: 1179 - DNA, 51 bp, Homo sapiens
tccaaatgaaagacatgctaccttcwctatagtagttattcaatcaataac

SEQ ID NO: 1180 - DNA, 51 bp, Homo sapiens
attctctaaatttcccaggagagtascactaatttgcaactatgttctaag

SEQ ID NO: 1181 - DNA, 51 bp, Homo sapiens
gaactttgtcattttgtgtaataaamgtacctctcccaagccccattctct

SEQ ID NO: 1182 - DNA, 51 bp, Homo sapiens
aaaattggagtttgcctagtcctgcraagttctgttccaaaagggaaataa

SEQ ID NO: 1183 - DNA, 51 bp, Homo sapiens
atagccaccaagatgataaagcacawattggtataaaccttgttagataag

SEQ ID NO: 1184 - DNA, 51 bp, Homo sapiens
ttttgcttcatcactgtagacttttycagataggataatttctgtcttcaa

SEQ ID NO: 1185 - DNA, 51 bp, Homo sapiens
ctgatgacaaattttcacagtttttrtctatctgaagttgtgttgtatttc

SEQ ID NO: 1186 - DNA, 51 bp, Homo sapiens
atatttcctatttcctacctaacgawgttacagaaaacttattacagattt

SEQ ID NO: 1187 - DNA, 51 bp, Homo sapiens
cagcagtttctactaagagtgagaayaggtgtccttttggcctgacagtca

SEQ ID NO: 1188 - DNA, 51 bp, Homo sapiens
tgtgatgattaaaatatgaaacagaraattcttagtacctgatctggggcg

SEQ ID NO: 1189 - DNA, 51 bp, Homo sapiens
gttaatgacagattaatcattgaagragtaaatattaataaactggaagat

SEQ ID NO: 1190 - DNA, 51 bp, Homo sapiens
tcccatgtgactcctatccacaggamggcctagactccatgtcaccccaac

SEQ ID NO: 1191 - DNA, 51 bp, Homo sapiens
aatgttgatattttgactttccacartgaaacataaatgtccttaatggca

SEQ ID NO: 1192 - DNA, 51 bp, Homo sapiens
gtgtagaaactgtagatgtggtagawataggaagagaactagaattagaag

SEQ ID NO: 1193 - DNA, 51 bp, Homo sapiens
tttgattcattgtatactttaaatasagtaggtatgcatttaattcccttt

SEQ ID NO: 1194 - DNA, 51 bp, Homo sapiens
atggctatgggaagtttcatgtgaawtcttttggagattctgaaagtctgt

SEQ ID NO: 1195 - DNA, 51 bp, Homo sapiens
aatggggctccatgacactttatctsaattggatttttttttaaagatcta

SEQ ID NO: 1196 - DNA, 51 bp, Homo sapiens
aatgctaaaagggctctattgaaaamgtatatttcttacaacctccactac

SEQ ID NO: 1197 - DNA, 51 bp, Homo sapiens
tttactggagattgaatatgccagartatcatggttcaaatgctacggtgt

SEQ ID NO: 1198 - DNA, 51 bp, Homo sapiens
agtcctgaggccagaatgagactagsacatggttcctttgcctacgtaaag

SEQ ID NO: 1199 - DNA, 51 bp, Homo sapiens
gatattgtttgcagttgtgacaaggyacaatgaatctctggtatgaccttg

SEQ ID NO: 1200 - DNA, 51 bp, Homo sapiens
ccaaactatatcaataattccatcawtctaaagtctttaatttagaaaagt

SEQ ID NO: 1201 - DNA, 51 bp, Homo sapiens
ctgtgaaatgaggatagcaataaaakttaacttctaaatttaagtattcaa

SEQ ID NO: 1202 - DNA, 51 bp, Homo sapiens
tgcctttttgtcaaatccttctgaargaaacaacgaagaacactgcagaac

SEQ ID NO: 1203 - DNA, 51 bp, Homo sapiens
acataatacttaacattacaaatagraaaagatgggcttctttagcaaaac

SEQ ID NO: 1204 - DNA, 51 bp, Homo sapiens
gtgataacccattagaaggcaatgaycttttctgtagattcaatgtagaag

SEQ ID NO: 1205 - DNA, 51 bp, Homo sapiens
gaatcagaattttgtgtttcttctaygaactgtggaaatctagagctgtat

SEQ ID NO: 1206 - DNA, 51 bp, Homo sapiens
tttcattatcaacatgtctatgaaaktatctggcttaaaacacctgatact

SEQ ID NO: 1207 - DNA, 51 bp, Homo sapiens
gatatacaatttgacaccagaggtasaggaattcctacacatgtctaccaa

SEQ ID NO: 1208 - DNA, 51 bp, Homo sapiens
gaaagagagagccattgaattcagargagaaaattatctgattcttagcag

SEQ ID NO: 1209 - DNA, 51 bp, Homo sapiens
gctgcttgttagtctttatcattttyttacatggctatataaataaactaa

SEQ ID NO: 1210 - DNA, 51 bp, Homo sapiens
ttggttgtcctaactgtgaagagtayactaatggcatctagagagtagaag

SEQ ID NO: 1211 - DNA, 51 bp, Homo sapiens
cacacaacttagtatgttagtttacrcgccagaaaaagctaaataaagttt

SEQ ID NO: 1212 - DNA, 51 bp, Homo sapiens
gctagcaaagaaaaaaaaatttcaartagctatgagggtcaacatgggaaa

SEQ ID NO: 1213 - DNA, 51 bp, Homo sapiens
tgaaacatcaggctgtctcagcatawcattcattcctcacttctcttagca

SEQ ID NO: 1214 - DNA, 51 bp, Homo sapiens
gctttctagcttgctgctcagctaamaagaaaccactttggctgataaaga

SEQ ID NO: 1215 - DNA, 51 bp, Homo sapiens
gtaaagtctacacctgccattagtaygtaagaagagagaggtcaaaggggc

SEQ ID NO: 1216 - DNA, 51 bp, Homo sapiens
ggaagtctgagaggctttgtctgtcmctttcaattaaccaggatcaaccaa

SEQ ID NO: 1217 - DNA, 51 bp, Homo sapiens
gtccttcctctccaccaggctaccartcaggataataaatgcaaagctggg

SEQ ID NO: 1218 - DNA, 51 bp, Homo sapiens
caaataaagccattctcctgtataayaaccccaatgccatcatcataccta

SEQ ID NO: 1219 - DNA, 51 bp, Homo sapiens
cagtaccagagctgcttatatcaccrgaagaaaagttttacatcagcctag

SEQ ID NO: 1220 - DNA, 51 bp, Homo sapiens
tgagtccagaagaacaactgcacaasgttagaactgcattggaagcttttg

SEQ ID NO: 1221 - DNA, 51 bp, Homo sapiens
acacgtgggaatggtttcacttgcckcaactcgcccaggcgctgcccgcac

SEQ ID NO: 1222 - DNA, 51 bp, Homo sapiens
tgggagtcctctgagctcttatgcayggtggaaaaagcatgagatttgaca

SEQ ID NO: 1223 - DNA, 51 bp, Homo sapiens
gttctgaagtctgtgtttacccagakgtagaagataacaggtacattatga

SEQ ID NO: 1224 - DNA, 51 bp, Homo sapiens
cttcagttcaattcagtcttcctgartatctactttgtttagagtcatggt

SEQ ID NO: 1225 - DNA, 51 bp, Homo sapiens
ggggcagaggcaagacattccccacrcctctctgggctagcctcagcatgt

SEQ ID NO: 1226 - DNA, 51 bp, Homo sapiens
tcccattttcttaatgcgcataaaaygagagtaactagccatttctcatct

SEQ ID NO: 1227 - DNA, 51 bp, Homo sapiens
tgagaacatgactttgtattattccyagctcatggttgcagagccactgca

SEQ ID NO: 1228 - DNA, 51 bp, Homo sapiens
aacactgtccaaaaacatgagttaamatagacagcattctactgggcatca

SEQ ID NO: 1229 - DNA, 51 bp, Homo sapiens
ggtgaacttgttgtccaaagctcagmattgcttatctcactgtaaagtcct

SEQ ID NO: 1230 - DNA, 51 bp, Homo sapiens
aacatcacatttgacaggaataaagmattatgctgatggaggagatggagc

SEQ ID NO: 1231 - DNA, 51 bp, Homo sapiens
ataattcttttcaaccctggccttaygatgctaagggcacagttctcccct

SEQ ID NO: 1232 - DNA, 51 bp, Homo sapiens
ttctctcctggccaccagcagaaacygagtagagaataaactctcaggcta

SEQ ID NO: 1233 - DNA, 51 bp, Homo sapiens
gccccatctaatgctcaagctgtaaygctaccttagtttctccaattaaca

SEQ ID NO: 1234 - DNA, 51 bp, Homo sapiens
tctgatttcatgcctttattcagatkatcctacatatgaccttttttctat

SEQ ID NO: 1235 - DNA, 51 bp, Homo sapiens
ctttcgaacatgcccggctgcatacrtagcagtctgttctttgtctgccat

SEQ ID NO: 1236 - DNA, 51 bp, Homo sapiens
ggtttaaatttcagtaagattttcarggcagaatgagacttccggcaacta

SEQ ID NO: 1237 - DNA, 51 bp, Homo sapiens
tagctgctaccccagagcagggaaartctcaagcaaacaactgccctgtgc

SEQ ID NO: 1238 - DNA, 51 bp, Homo sapiens
agactagttctctcactagatcaaayatacaagtcaattgttttcagtcat

SEQ ID NO: 1239 - DNA, 51 bp, Homo sapiens
ctgcccaggctagctacaattcagargttcatacaggtccagtctgtcctg

SEQ ID NO: 1240 - DNA, 51 bp, Homo sapiens
actggttatgtagcatttgggatgaygataaaagtcaaggatcagcaaact

SEQ ID NO: 1241 - DNA, 51 bp, Homo sapiens
gcagttatagctgactttaagtaaarcagacgataatatgtgtgagcttta

SEQ ID NO: 1242 - DNA, 51 bp, Homo sapiens
tgaccttatttactgaaaccaaagcratgtcagacgatgtaaacttctgaa

SEQ ID NO: 1243 - DNA, 51 bp, Homo sapiens
tacacagaagagagctactagagacrttgctggcatgcagtcatgttgaat

SEQ ID NO: 1244 - DNA, 51 bp, Homo sapiens
tgaatgggtatcactacatgccagamcggtgcatcagccaagccgaggcaa

SEQ ID NO: 1245 - DNA, 51 bp, Homo sapiens
gttactaagaggaatgttcttacagygatgttaccaagcacatacaaacat

SEQ ID NO: 1246 - DNA, 51 bp, Homo sapiens
atatgattataatgtatcatataacmaatgccctattactagacacacagt

SEQ ID NO: 1247 - DNA, 51 bp, Homo sapiens
tacagaatatctacttcattaaggaygattagcctaaaaatatccatcaac

SEQ ID NO: 1248 - DNA, 51 bp, Homo sapiens
ttgagaaagtctgtggacatattccrcttttgctggattacagttaaacca

SEQ ID NO: 1249 - DNA, 51 bp, Homo sapiens
ttggcaaatgagtttcgattgcccaragtataagttgggactggcccagct

SEQ ID NO: 1250 - DNA, 51 bp, Homo sapiens
ttattctccattctccacttcgtacrccacatatacataagagttttcaaa

SEQ ID NO: 1251 - DNA, 51 bp, Homo sapiens
aaaagtataaatggctgaactttaarctcaaaatactcttcttgtcagaga

SEQ ID NO: 1252 - DNA, 51 bp, Homo sapiens
ctccttcaatgtctgtgagaagaagsctgaagggtgagctaagtccatcca

SEQ ID NO: 1253 - DNA, 51 bp, Homo sapiens
ccttgattcaagacctgagtatggcrcactcatcactggtcaggcacaagg

SEQ ID NO: 1254 - DNA, 51 bp, Homo sapiens
ggtttctgactttggcaagttgctcsatctctccaagactgtttttggaat

SEQ ID NO: 1255 - DNA, 51 bp, Homo sapiens
aaaaacaacccagtaatcttccttcraattcatgaaacactgggaaattcc

SEQ ID NO: 1256 - DNA, 51 bp, Homo sapiens
ccccaagagtctctgcggagaagaargctaccccctaagactgaggccatg

SEQ ID NO: 1257 - DNA, 51 bp, Homo sapiens
ggtgtggggccttctcctgtagcaakataattacagtcatcagccacaata

SEQ ID NO: 1258 - DNA, 51 bp, Homo sapiens
atcgctatttacaaagcacgttcgcratcatttgcacatttaaactccaga

SEQ ID NO: 1259 - DNA, 51 bp, Homo sapiens
agataatttgtaaaaccttcactgarcttaaaatccatgtagttaatgaaa

SEQ ID NO: 1260 - DNA, 51 bp, Homo sapiens
cgtttaatgcacagtggacacatcaracttcccaatgtccttgctgaaaag

SEQ ID NO: 1261 - DNA, 51 bp, Homo sapiens
tctggacgagataaacataaaagaamcactctaccaccctcacacattctt

SEQ ID NO: 1262 - DNA, 51 bp, Homo sapiens
agcaattcttgcatctccatagatckacttcctggccagtcatttctttag

SEQ ID NO: 1263 - DNA, 51 bp, Homo sapiens
atattttatcatccataaaaattacractcagaagatgaatttattagcgg

SEQ ID NO: 1264 - DNA, 51 bp, Homo sapiens
ccccaaacccttccttcttatttagsccatcactcctcaaaccctgagaaa

SEQ ID NO: 1265 - DNA, 51 bp, Homo sapiens
atttgaacaaattcattaaaagcaaytctatgtgaagcaaaaatacagaga

SEQ ID NO: 1266 - DNA, 51 bp, Homo sapiens
gcaaatgacaggtataagagttcacraaataccttgagaaggaagaaatcc

SEQ ID NO: 1267 - DNA, 51 bp, Homo sapiens
aggcttaccaataagcctggaacaawttctttctaatacatattaaaggca

SEQ ID NO: 1268 - DNA, 51 bp, Homo sapiens
attaattcaaaagagaacagtagaartaagagaaagagaagcaggagcttt

SEQ ID NO: 1269 - DNA, 51 bp, Homo sapiens
tggaagaaaacaaaacagagtaacasggtagagagcaatttgacaagaggg

SEQ ID NO: 1270 - DNA, 51 bp, Homo sapiens
taacacggtagagagcaatttgacargagggtaaggtcagtactttagata

SEQ ID NO: 1271 - DNA, 51 bp, Homo sapiens
taagaggccctagggtgatgctaaayggcaaattagatacatgtctgctgt

SEQ ID NO: 1272 - DNA, 51 bp, Homo sapiens
taggagcagacagggtaccaacaacyaagtgtccatatgaagctacctgat

SEQ ID NO: 1273 - DNA, 51 bp, Homo sapiens
tccattcaacacatgactctccttamcattacacaattcagtgaatacatt

SEQ ID NO: 1274 - DNA, 51 bp, Homo sapiens
tggaacacgtaagaagattcagttcraaagaggcaatgcctgggctcttgc

SEQ ID NO: 1275 - DNA, 51 bp, Homo sapiens
ccttggacaaacacaactctaaccaygcacactcagtaggaaatgttgata

SEQ ID NO: 1276 - DNA, 51 bp, Homo sapiens
gaagccaaaaataaaaaagccaggasatagatggacagtaatatttgaggg

SEQ ID NO: 1277 - DNA, 51 bp, Homo sapiens
attcatacacacagatatctgagacygaagactaaacattaaaatgaatca

SEQ ID NO: 1278 - DNA, 51 bp, Homo sapiens
gagcatctgtgtatccagtgtcttcyaaacttctgccaagttcttctcaaa

SEQ ID NO: 1279 - DNA, 51 bp, Homo sapiens
taacagtatcttgaacaatcattaargtaagtactcggtacttattattga

SEQ ID NO: 1280 - DNA, 51 bp, Homo sapiens
tatattcccaattgatacagctttgragaacaactaaaatttcagcaggtg

SEQ ID NO: 1281 - DNA, 51 bp, Homo sapiens
aaaatatagcacagcatgttgcatamagaaagtgtgtcattaagaaggggt

SEQ ID NO: 1282 - DNA, 51 bp, Homo sapiens
gatgacattaatgattaaggtgaagmagaattataattcagaggccttttt

SEQ ID NO: 1283 - DNA, 51 bp, Homo sapiens
actcacaaacaccctatctgtgaacmaactgctcatgtcatactgccctaa

SEQ ID NO: 1284 - DNA, 51 bp, Homo sapiens
tattctgtgcttattggcaaacgaayggactgcagtaactcccaattgctt

SEQ ID NO: 1285 - DNA, 51 bp, Homo sapiens
agaagagcagtaagtttgcttctcartaaagggttaggacccagtgggggt

SEQ ID NO: 1286 - DNA, 51 bp, Homo sapiens
agccgggttggattttctagccccaygctttacagatgttcagatttcttg

SEQ ID NO: 1287 - DNA, 51 bp, Homo sapiens
tcagtgagtgaaccactacatgtaartataacaaggtagatggatttcaaa

SEQ ID NO: 1288 - DNA, 51 bp, Homo sapiens
cagcattttctagaaaacagtggtayctccattggtaaagatgattggaat

SEQ ID NO: 1289 - DNA, 51 bp, Homo sapiens
aaaaaatgtgagtgtgtgcatagaayatttggtaagcattattgtctctgt

SEQ ID NO: 1290 - DNA, 51 bp, Homo sapiens
tttctgcataatccctgtggtctgayctggtaattcaaaggaaaagaatag

SEQ ID NO: 1291 - DNA, 51 bp, Homo sapiens
aaaagaaaaaaagttcattttgaagscttaactcacttatagctttaccct

SEQ ID NO: 1292 - DNA, 51 bp, Homo sapiens
acaggcaaatttattcaccatggaartcttgatatgagcaaactatcacat

SEQ ID NO: 1293 - DNA, 51 bp, Homo sapiens
ccccgccaccaaaaaatgattttacsaaggtctatccagagatacaaagct

SEQ ID NO: 1294 - DNA, 51 bp, Homo sapiens
acccaaatcactgacaataatctcayggaagtatatggccaagaagggttg

SEQ ID NO: 1295 - DNA, 51 bp, Homo sapiens
tccatcacccctcatggcccatcacyggagccttccacctgtgtccacttc

SEQ ID NO: 1296 - DNA, 51 bp, Homo sapiens
tgttgagggtcttcttgttcaatgcyatgggaatttcacctaatgcctgct

SEQ ID NO: 1297 - DNA, 51 bp, Homo sapiens
catctttagatcttctctcagtctamaattctccctaggcagtcttactca

SEQ ID NO: 1298 - DNA, 51 bp, Homo sapiens
agcagatatactttaaattatgtccygcagaatactattgcaagtcatctt

SEQ ID NO: 1299 - DNA, 51 bp, Homo sapiens
tgatcctctaaaggcatatggagtamagtgggataattttaacgtttagat

SEQ ID NO: 1300 - DNA, 51 bp, Homo sapiens
tgtcatgaaaaccagaactaaggaaygtgccagagaagtgtgcctgctcca

SEQ ID NO: 1301 - DNA, 51 bp, Homo sapiens
gttttggagggcagcactaagagccratcatacagagatcacaggaagctg

SEQ ID NO: 1302 - DNA, 51 bp, Homo sapiens
accattaaaatgatgcaagctctgarcacaaggagacaatgtacatttttc

SEQ ID NO: 1303 - DNA, 51 bp, Homo sapiens
aaaaattaaaaattaaaacactgggwaagaatgagataggatctgctcagc

SEQ ID NO: 1304 - DNA, 51 bp, Homo sapiens
atgtcatcatcccacttgaagatgamaaggtagttctcaaaagcaatgaaa

SEQ ID NO: 1305 - DNA, 51 bp, Homo sapiens
gcattgatctccctctgcgttgacaygaacatcatactgaagctgacatct

SEQ ID NO: 1306 - DNA, 51 bp, Homo sapiens
tggcccaaagagacaccaaagagcakatagaaataggtgagacctcttaag

SEQ ID NO: 1307 - DNA, 51 bp, Homo sapiens
gctgcagttgatggaacctcgaaacyaacagtattttagaagcttcttctt

SEQ ID NO: 1308 - DNA, 51 bp, Homo sapiens
tcataatctaggacaaatatgatacygacaggctattaataaagccagttc

SEQ ID NO: 1309 - DNA, 51 bp, Homo sapiens
tcctatctccaaaaaagttcccaatkagtgcaaatctgtcaggataatatt

SEQ ID NO: 1310 - DNA, 51 bp, Homo sapiens
ctcccaacatataaaagagatttcaktaggtgcattggaatgaagaaaatc

SEQ ID NO: 1311 - DNA, 51 bp, Homo sapiens
gaaaaaatggtgtggacaagaatacratacagtacttaggatgcaggcttg

SEQ ID NO: 1312 - DNA, 51 bp, Homo sapiens
tcatgatgagctctaaaacatggaamaggcaagtcaatcttctaaatctca

SEQ ID NO: 1313 - DNA, 51 bp, Homo sapiens
catggatctcacacaatggctaatayagttaagtctaatgagatgggcctg

SEQ ID NO: 1314 - DNA, 51 bp, Homo sapiens
tagagtcaattgactgtaggtgatamacatatacacaaaataccttcacag

SEQ ID NO: 1315 - DNA, 51 bp, Homo sapiens
gtattttcttacataaaacattccartcacttgtttattacttctattttc

SEQ ID NO: 1316 - DNA, 51 bp, Homo sapiens
aagacctcattgtctaatggaaaacrgatataaatgatgcaatacactaaa

SEQ ID NO: 1317 - DNA, 51 bp, Homo sapiens
cactttcaaacaccattgtttctcarattctaagtcttgtgctctgaagtt

SEQ ID NO: 1318 - DNA, 51 bp, Homo sapiens
gaataagagcagacagggtccagaaygcaggggatcagagagaagatgcag

SEQ ID NO: 1319 - DNA, 51 bp, Homo sapiens
gttatgttcagacttattacaaaaarcacttcctgaattttaaataatgaa

SEQ ID NO: 1320 - DNA, 51 bp, Homo sapiens
agttttggtcccatctaaccaagccraaagttgagatttgaaggttgattt

SEQ ID NO: 1321 - DNA, 51 bp, Homo sapiens
catgtggttgactgccttttgatacsatttacaggaactggcagagaaaac

SEQ ID NO: 1322 - DNA, 51 bp, Homo sapiens
attaaggaaaagaagtgtatctggargaatctagtcaaaatgtgaaagtat

SEQ ID NO: 1323 - DNA, 51 bp, Homo sapiens
ctcctttgtcttgttgctgtggtgcwgaacaacttgaaactgtaattggga

SEQ ID NO: 1324 - DNA, 51 bp, Homo sapiens
agaccttactgaggtaatagggaagwccattccaatatttaggggagaaag

SEQ ID NO: 1325 - DNA, 51 bp, Homo sapiens
taaagatagaacattacaattttgcrgagggtaaacctatacaaattagtg

SEQ ID NO: 1326 - DNA, 51 bp, Homo sapiens
ctttggtcttatactcaatcccagargctttagcaatagcaatgttttatc

SEQ ID NO: 1327 - DNA, 51 bp, Homo sapiens
gttctaagtatgttggaaagacccargaggttattaagcagaataaaattt

SEQ ID NO: 1328 - DNA, 51 bp, Homo sapiens
atggtacatatctgataaaaaatcamcttgaaaatggcaggtataaatgac

SEQ ID NO: 1329 - DNA, 51 bp, Homo sapiens
gccaaagtttctgagatgcctatccrgcctttccctgttatcttttatagt

SEQ ID NO: 1330 - DNA, 51 bp, Homo sapiens
gcttctgggttaaagcaggtaaaaartgactcatcttctttaggacaatgc

SEQ ID NO: 1331 - DNA, 51 bp, Homo sapiens
taaccctgactctgttggagcataamgatgttgcaactgaagatattatat

SEQ ID NO: 1332 - DNA, 51 bp, Homo sapiens
ctgacctatgtcttcaggaatcttasagtctactaaagagagaaacagttc

SEQ ID NO: 1333 - DNA, 51 bp, Homo sapiens
gggatttctacaattccctcttgacyaacagtgtgaatctacttgttccag

SEQ ID NO: 1334 - DNA, 51 bp, Homo sapiens
atatgcaatgaaagtctggtaaatayagaacagtgtgataaaggctacctg

SEQ ID NO: 1335 - DNA, 51 bp, Homo sapiens
tatgcaattgtgcagtaggttagcaraattatctgagcttccatactcata

SEQ ID NO: 1336 - DNA, 51 bp, Homo sapiens
aaataaaagataaactcgaaaccaayttacagtgtcagtataaaatctctt

SEQ ID NO: 1337 - DNA, 51 bp, Homo sapiens
actgtttttcttggtgaaataatcartacaaggtagttgcaagtttagaat

SEQ ID NO: 1338 - DNA, 51 bp, Homo sapiens
tagagaaacctagaatagatcttgaygacaacatgacccagaatgcctggg

SEQ ID NO: 1339 - DNA, 51 bp, Homo sapiens
catttctgctttcttatcacataaamcattatgccatgatctatcccactt

SEQ ID NO: 1340 - DNA, 51 bp, Homo sapiens
gaatgaaatttgtaacagaactctaygctgtttgcaaatgctgtcagctct

SEQ ID NO: 1341 - DNA, 51 bp, Homo sapiens
tagttcttttttatttatgcactgcwataatggtaacaaatttcaagcagt

SEQ ID NO: 1342 - DNA, 51 bp, Homo sapiens
cgaacagaagtttcctagaggaaagyctcctttggaatatgtccaggaaag

SEQ ID NO: 1343 - DNA, 51 bp, Homo sapiens
ttgcaaaaatgactaacacattgaaycaagggacaaagtcagtaaaaagcc

SEQ ID NO: 1344 - DNA, 51 bp, Homo sapiens
atagttttagtcaacattagtgatayaaagttggattcagttcattgatag

SEQ ID NO: 1345 - DNA, 51 bp, Homo sapiens
acttggacatgattatagtttagaamaaattgagtcacgaatatgctggtt

SEQ ID NO: 1346 - DNA, 51 bp, Homo sapiens
ataaaacaatgaagttacccatttcracaatgcttggcaattttttaccaa

SEQ ID NO: 1347 - DNA, 51 bp, Homo sapiens
agttgccagtaaagtatgttagttamacacaggtcttgcgtttcatcttcc

SEQ ID NO: 1348 - DNA, 51 bp, Homo sapiens
gtttaacctaagattaagattaatcrcagcattatttacaacagccaagat

SEQ ID NO: 1349 - DNA, 51 bp, Homo sapiens
agcggcttccagtctgtggtgcaaasaaagaaatactattctctagtgcag

SEQ ID NO: 1350 - DNA, 51 bp, Homo sapiens
aatggactaatacataataatattcrgaaaagaggccctatgtttcatttt

SEQ ID NO: 1351 - DNA, 51 bp, Homo sapiens
agttccagaaactgtgtaggactaayatgtctatttactagtgatacattt

SEQ ID NO: 1352 - DNA, 51 bp, Homo sapiens
tagaatggctgttataaaaaaggcamatataacagatgctggtgaggatgt

SEQ ID NO: 1353 - DNA, 51 bp, Homo sapiens
aaaacctctgccagagttcatagacyatattcacattaaacacactgatat

SEQ ID NO: 1354 - DNA, 51 bp, Homo sapiens
ataaattttatttatgtcaatctaaygggacctatacaatttagctagaat

SEQ ID NO: 1355 - DNA, 51 bp, Homo sapiens
tctcaacatatctacctatatattargatacatgcattcccagggtttcta

SEQ ID NO: 1356 - DNA, 51 bp, Homo sapiens
atgatttatctgcatcaatcttaagyaactctttgtaattattgctaaata

SEQ ID NO: 1357 - DNA, 51 bp, Homo sapiens
ggattctgaatgcaaagaaaatactsagatagctttactagtttatagtgg

SEQ ID NO: 1358 - DNA, 51 bp, Homo sapiens
agtcattgagttccttccacagagcsctggagataaaacagctgcaatgct

SEQ ID NO: 1359 - DNA, 51 bp, Homo sapiens
tatgtaaatttttgattggtaaagaycttggaaatgaaatcttaattaatt

SEQ ID NO: 1360 - DNA, 51 bp, Homo sapiens
cagttaaagagactaggaagactcaragatggtagtaatctatatttttat

SEQ ID NO: 1361 - DNA, 51 bp, Homo sapiens
cagaatgatatcttgcctataattcrgaaggtaatagtgaacaaatgaaga

SEQ ID NO: 1362 - DNA, 51 bp, Homo sapiens
cagtactaagggtggttaaaagtatraagtaggtgagaattaagtagaaac

SEQ ID NO: 1363 - DNA, 51 bp, Homo sapiens
tccttggagccctttgctattatcayaattctcactatccttgcaaaccat

SEQ ID NO: 1364 - DNA, 51 bp, Homo sapiens
gaacatatgatactttggtccattayaaccctgttagaccatagcccttgt

SEQ ID NO: 1365 - DNA, 51 bp, Homo sapiens
catcacagatgaggaagtgaaactcrgataaattaaattcagatcacacag

SEQ ID NO: 1366 - DNA, 51 bp, Homo sapiens
taatttcatgggtctatcagtttcaygggtaatcctctgcctctgtaagct

SEQ ID NO: 1367 - DNA, 51 bp, Homo sapiens
gtgggcctctgggttgggccaagaawttcagactgggcgccatgaccaagg

SEQ ID NO: 1368 - DNA, 51 bp, Homo sapiens
cctatatatgcacagtgatgcatacyagttaaacactcgtaaatttgtttt

SEQ ID NO: 1369 - DNA, 51 bp, Homo sapiens
gcatagctagcccatcacattgatasagggacttcaactttatctgtaatg

SEQ ID NO: 1370 - DNA, 51 bp, Homo sapiens
agtggtcagggatcctctgtcttcayagaatctcgagtgagcagccaacag

SEQ ID NO: 1371 - DNA, 51 bp, Homo sapiens
aaatgtttcaggaaataatttctatragttgattctgaaaataaatcagta

SEQ ID NO: 1372 - DNA, 51 bp, Homo sapiens
cttattagaaaagtttctctacttamaattcataaaaatttgacccaattt

SEQ ID NO: 1373 - DNA, 51 bp, Homo sapiens
aaaataatcgtccagactttcagcastagattgagactaatttaggccaat

SEQ ID NO: 1374 - DNA, 51 bp, Homo sapiens
aaaagaacactaggatggatcttgamaaaaatagttaaaagggccttaagt

SEQ ID NO: 1375 - DNA, 51 bp, Homo sapiens
ttaaaagctaatttaaaaaatctcaygtagaattaatggacagatagaaag

SEQ ID NO: 1376 - DNA, 51 bp, Homo sapiens
cctgacaaactcagtgacattcacamagggcatcgtgggaacaaataaaag

SEQ ID NO: 1377 - DNA, 51 bp, Homo sapiens
aaggcagaaaagagtgaataatgaamatatgatgtaaaaaatccagtaatc

SEQ ID NO: 1378 - DNA, 51 bp, Homo sapiens
tattacagatgaatattttaaaggasaaatagcctaccagttctgctaatt

SEQ ID NO: 1379 - DNA, 51 bp, Homo sapiens
atactagtaaccctagtgattgtgtraataaaaaaacgtagctcttataaa

SEQ ID NO: 1380 - DNA, 51 bp, Homo sapiens
aatacaggaaatgaaataccaaaaarttataagccatatagaaaacaaata

SEQ ID NO: 1381 - DNA, 51 bp, Homo sapiens
tacaaatatggagtgggattgagaaygaaagttgaagaaagagacgggttg

SEQ ID NO: 1382 - DNA, 51 bp, Homo sapiens
aaacttaataatcagattttttaaaygtccttctgatattcatgcagacaa

SEQ ID NO: 1383 - DNA, 51 bp, Homo sapiens
agtgatgttagtttgtttggtgcacycatatttgttcttggaccttcactt

SEQ ID NO: 1384 - DNA, 51 bp, Homo sapiens
acttctttccacctttgaagtcccaygtaagtgtctctcattagcagatgc

SEQ ID NO: 1385 - DNA, 51 bp, Homo sapiens
gtgtgtgttgggggaggagttgggaygaaggtatcaataaaggaagaaaag

SEQ ID NO: 1386 - DNA, 51 bp, Homo sapiens
ggcccagtgctgactcttttcaccayggaacaccaaagagactctccacac

SEQ ID NO: 1387 - DNA, 51 bp, Homo sapiens
ggaaaatacttgtgcaaatagcaagractgttcctgagggctgtgtaatga

SEQ ID NO: 1388 - DNA, 51 bp, Homo sapiens
ataatttgatgttatttgaattattscagtccatagaaaaagatgacgagc

SEQ ID NO: 1389 - DNA, 51 bp, Homo sapiens
actaggcactaaagaaaatctcgatwaacaactaagtttgaaaatgtacag

SEQ ID NO: 1390 - DNA, 51 bp, Homo sapiens
atattcacaccccaaattaaatacaycagagttgctaaaacccaactagtc

SEQ ID NO: 1391 - DNA, 51 bp, Homo sapiens
aagacagcagacacagtatgaggaayataagagtgaatagggaaacctaat

SEQ ID NO: 1392 - DNA, 51 bp, Homo sapiens
tgattgatttttaccagaatctgacmagttactaaacaatacaaggtaaaa

SEQ ID NO: 1393 - DNA, 51 bp, Homo sapiens
taggcttttgggaaggctacttgaargaatggaatcagttttgcctgactc

SEQ ID NO: 1394 - DNA, 51 bp, Homo sapiens
tcagtttctgcatacagttttcatcrcctaaaagtaggtgtcaaatatctg

SEQ ID NO: 1395 - DNA, 51 bp, Homo sapiens
gaataagcaaataattacaaagctargatccaagaaagccaaaatcgacag

SEQ ID NO: 1396 - DNA, 51 bp, Homo sapiens
agaatgctacaactattaaaaaaaawtcacctgataggatctctgttcttt

SEQ ID NO: 1397 - DNA, 51 bp, Homo sapiens
gacaactttacactaagctgaataaygttcatttactcaaaagctagtcta

SEQ ID NO: 1398 - DNA, 51 bp, Homo sapiens
tttgttacttacagctgaattaagaygtttataaattatggctaaaaatta

SEQ ID NO: 1399 - DNA, 51 bp, Homo sapiens
tttttcaacttagaaatttatgggartaggacaatttgtttctaatattgc

SEQ ID NO: 1400 - DNA, 51 bp, Homo sapiens
atcaaccaccaaagtcattattcaarcatagtggttctcaacggggtgatt

SEQ ID NO: 1401 - DNA, 51 bp, Homo sapiens
tttcttctcattgcatttgggtccaygtttatctggagaagtaaatagaga

SEQ ID NO: 1402 - DNA, 51 bp, Homo sapiens
ttaaaaatctctgacaagttcttgayatgcaaatatttcatgttgttgatt

SEQ ID NO: 1403 - DNA, 51 bp, Homo sapiens
attaataaaaacagataggtgatgayagatgatagagaaagatagagaaag

SEQ ID NO: 1404 - DNA, 51 bp, Homo sapiens
tcttccccgtggacttaagttacatyaccataagcagcagtagcaacagca

SEQ ID NO: 1405 - DNA, 51 bp, Homo sapiens
ttgggctaaatacctagataccttasatacttagggctaaagaaaatgact

SEQ ID NO: 1406 - DNA, 51 bp, Homo sapiens
gaagatagaaattcaaaatttatcarcatgcattatatttagagccacagt

SEQ ID NO: 1407 - DNA, 51 bp, Homo sapiens
aattagttcataggatcactaaacamatagttgaatattaaccagttttaa

SEQ ID NO: 1408 - DNA, 51 bp, Homo sapiens
aggaaagcttgaaatggcctcctaaytgttttccttctttctcttgttgca

SEQ ID NO: 1409 - DNA, 51 bp, Homo sapiens
tatgtacatctattttgtatcaatgraaataaaaagcaaaacacttcagga

SEQ ID NO: 1410 - DNA, 51 bp, Homo sapiens
gtaggaattaaataatctgaattagmaaaacaaaaacatacacataatcta

SEQ ID NO: 1411 - DNA, 51 bp, Homo sapiens
aaggagagtaataagacaaaaattgraatgacaataataaataaaagtgga

SEQ ID NO: 1412 - DNA, 51 bp, Homo sapiens
tatgtttctttgctttacatgatatkacacactctgtatttctgaccctga

SEQ ID NO: 1413 - DNA, 51 bp, Homo sapiens
actccagattccagggcttagtttakgtcatgaggtcacatttatttcatg

SEQ ID NO: 1414 - DNA, 51 bp, Homo sapiens
ccctcctggatgtgttatccatatcratgtactggctgttaaaattcatgt

SEQ ID NO: 1415 - DNA, 51 bp, Homo sapiens
agatgaagggagaacttgtacattaraagagacttaagaaacgtaacaacc

SEQ ID NO: 1416 - DNA, 51 bp, Homo sapiens
actgtaatacaaaagcatgcctaggracactagcacctaactcaatatgcc

SEQ ID NO: 1417 - DNA, 51 bp, Homo sapiens
ctcctgttttgaaaggagggacttayctttgtggtcatgtatttgacacct

SEQ ID NO: 1418 - DNA, 51 bp, Homo sapiens
ctcatgaatgacaccattatacccayggagtcctggtctctagtcctagtg

SEQ ID NO: 1419 - DNA, 51 bp, Homo sapiens
ttacaatcagaaatattggttaatargacactgctgtatctgtggccatga

SEQ ID NO: 1420 - DNA, 51 bp, Homo sapiens
catagtaatagtcctgatttggagayggatgacaaggcaacaccaaagctt

SEQ ID NO: 1421 - DNA, 51 bp, Homo sapiens
ttctcttgagtgaagattcccataartgttgctttgtaaatgtgtccaggg

SEQ ID NO: 1422 - DNA, 51 bp, Homo sapiens
tcctggtatattagcataaccagtarcttgtagatatcatagtccaataat

SEQ ID NO: 1423 - DNA, 51 bp, Homo sapiens
cattggaaatatgatataacaccaastcttcttcaactgtatcatatagag

SEQ ID NO: 1424 - DNA, 51 bp, Homo sapiens
cccctgtaggatcgaccttgcaaatyaaccttggatctggtagctaagccc

SEQ ID NO: 1425 - DNA, 51 bp, Homo sapiens
tggtgggggtccagctcatttagaamcttgttggttgttgtgagaactcca

SEQ ID NO: 1426 - DNA, 51 bp, Homo sapiens
agcaggaatggtggtaccaataataraagtgataatcaccaatatcatcat

SEQ ID NO: 1427 - DNA, 51 bp, Homo sapiens
gggggttgaggaagttcatattcccyagatgatgcccaagaatgactttga

SEQ ID NO: 1428 - DNA, 51 bp, Homo sapiens
aaacaaagaccatggctaaatattgraattgggaaaagggcttttcttctc

SEQ ID NO: 1429 - DNA, 51 bp, Homo sapiens
aatgaattttctcaaagtaacgttargtattggtaagatttcatttatcca

SEQ ID NO: 1430 - DNA, 51 bp, Homo sapiens
cacagtaaggttatacttcacaactrctagggtggctgtaattaaaagaca

SEQ ID NO: 1431 - DNA, 51 bp, Homo sapiens
tcctgatctcattactgggtcaccaycttgatcattggtccccatcttccc

SEQ ID NO: 1432 - DNA, 51 bp, Homo sapiens
attaaaaaaatactaagaacttatasctaggcaattttagaaacctacttt

SEQ ID NO: 1433 - DNA, 51 bp, Homo sapiens
ttaaattatgatctattgattccaarcagctagtgtgaaaaataatttcat

SEQ ID NO: 1434 - DNA, 51 bp, Homo sapiens
gtggagctcaatgagctccctgaaaragtaatgccacagtagggtgcagaa

SEQ ID NO: 1435 - DNA, 51 bp, Homo sapiens
tatgaggatcaagcattgggtgtcawctctaaatatgaggccaccaccata

SEQ ID NO: 1436 - DNA, 51 bp, Homo sapiens
gtagctaatctgaacctctggattcrgtaattggtagtacttacctcccac

SEQ ID NO: 1437 - DNA, 51 bp, Homo sapiens
agttttttaaaccatgatggactacrgtaacaataaattgcattttttagt

SEQ ID NO: 1438 - DNA, 51 bp, Homo sapiens
aaaaaaagtagaagagatttgaacaygtctatataaaaaggaaaaaagaaa

SEQ ID NO: 1439 - DNA, 51 bp, Homo sapiens
ataatgctgtgactttgtattagccrggagtcctgaattatcaaaagattt

SEQ ID NO: 1440 - DNA, 51 bp, Homo sapiens
gtgtgttcaagtgcagtctctgtctratgatgcttcaaaaatagccagaca

SEQ ID NO: 1441 - DNA, 51 bp, Homo sapiens
ccatgtttaatgacaggagaggagayggcgcaggatcactcagggaatgag

SEQ ID NO: 1442 - DNA, 51 bp, Homo sapiens
ctctgcccatactgacaatactgacscagttgttaactcctgtgacctcag

SEQ ID NO: 1443 - DNA, 51 bp, Homo sapiens
tcaatagaagtcatgctttcagttaytttggataaatatccaaaagtagga

SEQ ID NO: 1444 - DNA, 51 bp, Homo sapiens
ctaagttctgatatctgcattgctcrccagacatgtatgtcaaggaccttc

SEQ ID NO: 1445 - DNA, 51 bp, Homo sapiens
gctctgggagttctgcattaacaaasgagatggaaattagtggttctgaga

SEQ ID NO: 1446 - DNA, 51 bp, Homo sapiens
caccaagactataatccctgagtccratagtgtattttcttttaaaaagaa

SEQ ID NO: 1447 - DNA, 51 bp, Homo sapiens
atctataaaacaataatgactagcargtataatgtgtgttatagtttgcag

SEQ ID NO: 1448 - DNA, 51 bp, Homo sapiens
cttatcctggctaagtgacaatcaaraaagtctgtgccactatggatgatg

SEQ ID NO: 1449 - DNA, 51 bp, Homo sapiens
ttcctatggagtgttgcgcaaaggayacatggagaatttgtaagatggatc

SEQ ID NO: 1450 - DNA, 51 bp, Homo sapiens
cagtaacattatatttcagtaaacaygtagctgctaaaatcataaatatat

SEQ ID NO: 1451 - DNA, 51 bp, Homo sapiens
ggatattatgattattgttcaaagaktcaatattagtgtcttagtgtgtta

SEQ ID NO: 1452 - DNA, 51 bp, Homo sapiens
tgctctactttttgcaaagcatttaycatcgtttaatatacaatataattt

SEQ ID NO: 1453 - DNA, 51 bp, Homo sapiens
tctctagaatgtcaattgcgtgaggwaagagtccattatgttcatttctgt

SEQ ID NO: 1454 - DNA, 51 bp, Homo sapiens
tttaaaactaacacagacacccaaayagccagttgttagtacatcaaacca

SEQ ID NO: 1455 - DNA, 51 bp, Homo sapiens
aatactacaactggcatgaaccagaygatataaaagtaacaatttacagat

SEQ ID NO: 1456 - DNA, 51 bp, Homo sapiens
ccagagcaatgcatatttatcattaygcctcattgttaccatctgcagagc

SEQ ID NO: 1457 - DNA, 51 bp, Homo sapiens
gctgcaatgtttaattagtttttackctcacgtgaagtgctttgattgtat

SEQ ID NO: 1458 - DNA, 51 bp, Homo sapiens
agagtccaagtcttccagactgtgaygaactgggcaaattaacaagttgtg

SEQ ID NO: 1459 - DNA, 51 bp, Homo sapiens
taccttacttgcaggatttgttgtayacttattctggaggtaattctgaat

SEQ ID NO: 1460 - DNA, 51 bp, Homo sapiens
gcatggaattcaagatgtttcattayctgatcccaatttttccttctagtt

SEQ ID NO: 1461 - DNA, 51 bp, Homo sapiens
tttaaagggcaactctgattgcaggraagagattttattaaaaggaagaag

SEQ ID NO: 1462 - DNA, 51 bp, Homo sapiens
ttccccaggatatggtagattaaacycagtcaccaaggctatctgacttgt

SEQ ID NO: 1463 - DNA, 51 bp, Homo sapiens
ctatctaggcatattaatgaactaawttaagacagagcagagatatcatcc

SEQ ID NO: 1464 - DNA, 51 bp, Homo sapiens
gagatatcatcctccacacaaatcaractgctactttattataggcccttt

SEQ ID NO: 1465 - DNA, 51 bp, Homo sapiens
aatatagaattacaagctcttttgakaaattctttgttaaaccataaattc

SEQ ID NO: 1466 - DNA, 51 bp, Homo sapiens
ttactgggcctgtccatttatgtgargagatgtgaaaagataccatgtgct

SEQ ID NO: 1467 - DNA, 51 bp, Homo sapiens
atgaagttgggagaaactattttcastactataagcaatggcctgaaaccc

SEQ ID NO: 1468 - DNA, 51 bp, Homo sapiens
ttcccatccgtcttgtgacccggaaycatggtgatctaaaagagccctgtg

SEQ ID NO: 1469 - DNA, 51 bp, Homo sapiens
atgttttacatgtggggatacagggwattaaatgcattggttatgatggac

SEQ ID NO: 1470 - DNA, 51 bp, Homo sapiens
gatagaagcttaggcattaacaggarcatgatgctgagatggtggaactgt

SEQ ID NO: 1471 - DNA, 51 bp, Homo sapiens
gcctggaggcaggaattgatggacartaaaagagattttttgacttgatgt

SEQ ID NO: 1472 - DNA, 51 bp, Homo sapiens
taatactttttgagcccttttttgartagactctaatttgaaaaggctgca

SEQ ID NO: 1473 - DNA, 51 bp, Homo sapiens
agatttatttcccatttcccatacaytggtaagatgcaaatgtcttactaa

SEQ ID NO: 1474 - DNA, 51 bp, Homo sapiens
atctacatagaattggtcaccacaasattggctggaataatagttcaagag

SEQ ID NO: 1475 - DNA, 51 bp, Homo sapiens
tcctgagttgcttttggtatatagtraaaggaagatatctagtttcaatca

SEQ ID NO: 1476 - DNA, 51 bp, Homo sapiens
tgaaaattaaatacagaattaaagargagccatttccatgagatcaaagag

SEQ ID NO: 1477 - DNA, 51 bp, Homo sapiens
tttctaatacccactatgcatttagyaggacattgaacagaaaagtaaatg

SEQ ID NO: 1478 - DNA, 51 bp, Homo sapiens
tgacattctccactatagtgctatawgactgcttcacagacatgtcttaaa

SEQ ID NO: 1479 - DNA, 51 bp, Homo sapiens
gcagttaaaattgctagagcctattyaaagttactggagagtaaaaagcac

SEQ ID NO: 1480 - DNA, 51 bp, Homo sapiens
gcaaaagaaatttgcactaagtacartgagataagtagggtgaaattatga

SEQ ID NO: 1481 - DNA, 51 bp, Homo sapiens
ataatctagaaaatattccgatagawcatttcaaatagagcaatgcatata

SEQ ID NO: 1482 - DNA, 51 bp, Homo sapiens
cctgcttatttatctggcataataarctatttgggcgggatgagggagata

SEQ ID NO: 1483 - DNA, 51 bp, Homo sapiens
gtaacaccattttacaaatgacataygttgcaaagtaaaaatctagtcatg

SEQ ID NO: 1484 - DNA, 51 bp, Homo sapiens
acagtctcaagttatttttactaaaycacaattattaacaagccaaaaatg

SEQ ID NO: 1485 - DNA, 51 bp, Homo sapiens
gtagaaaatacatagcatattctagyctgttaggtgaacaaatacttttca

SEQ ID NO: 1486 - DNA, 51 bp, Homo sapiens
cagggataagttccttctctaaccaygaaaactgatgtggtgacttctgcc

SEQ ID NO: 1487 - DNA, 51 bp, Homo sapiens
ttcccaaagtacagagggccactacyttctgagaaacagttttactaggtg

SEQ ID NO: 1488 - DNA, 51 bp, Homo sapiens
agaatttgtgtttgcttcttctcgaygcttaccattttaagcttagttttc

SEQ ID NO: 1489 - DNA, 51 bp, Homo sapiens
ccgtcaagcttctgtgggcaacaccrcctagagacatgctcctctcctcct

SEQ ID NO: 1490 - DNA, 51 bp, Homo sapiens
gttctttttgtcttttacctttatgyatattgtcaaaagattgttttccaa

SEQ ID NO: 1491 - DNA, 51 bp, Homo sapiens
gttttagaagcttgttaatgtttcaygtgcataaaaataaataattaaaat

SEQ ID NO: 1492 - DNA, 51 bp, Homo sapiens
ccaaagtaactatttaatgtaagcartctcttcaagaataagaaaataaat

SEQ ID NO: 1493 - DNA, 51 bp, Homo sapiens
ctttctctgtagatatattgtgaaaytaggaagaaataaaggttttatgtc

SEQ ID NO: 1494 - DNA, 51 bp, Homo sapiens
cacaacaatttctttatctagaaaawtgtaattgcttttgacctaccttga

SEQ ID NO: 1495 - DNA, 51 bp, Homo sapiens
ttaagctcacgccttaatcttataartgccataaataagcacacagagctg

SEQ ID NO: 1496 - DNA, 51 bp, Homo sapiens
tgacttgttctgtgctcttccagcayctattaaaatgaccatatatttttc

SEQ ID NO: 1497 - DNA, 51 bp, Homo sapiens
ctagtttcaaatgtgttatctgacawtgggaaaatcaatacactttcaggg

SEQ ID NO: 1498 - DNA, 51 bp, Homo sapiens
ccaatgtcagataacacatttgaaaytagactctaaacacaaatcatgcaa

SEQ ID NO: 1499 - DNA, 51 bp, Homo sapiens
tccccaccacgatcctcttcaaacayaccatacatcagagacattcacgtt

SEQ ID NO: 1500 - DNA, 51 bp, Homo sapiens
ttactaggagagatgtatttgtttaygtcatcattttacagattgtattga

SEQ ID NO: 1501 - DNA, 51 bp, Homo sapiens
cttcagagctagttggcattatcatkaatttatttggacttttgtggaaaa

SEQ ID NO: 1502 - DNA, 51 bp, Homo sapiens
gagaacatatgcattaaatgattcamgtcttcaggtcttattttaggtgaa

SEQ ID NO: 1503 - DNA, 51 bp, Homo sapiens
acaatacagcaacaactgagtattgstaacatacattaaacagaatgtgcc

SEQ ID NO: 1504 - DNA, 51 bp, Homo sapiens
gggttaagtatacatattttaaacayggataaacagaagacaatgaaagaa

SEQ ID NO: 1505 - DNA, 51 bp, Homo sapiens
aggttattacaaacctgttgttttaygtatgaatggggacaaggtgaatga

SEQ ID NO: 1506 - DNA, 51 bp, Homo sapiens
agtaatgtatgctatctgtacgtgtyaaaatcttcacatgcaattatttac

SEQ ID NO: 1507 - DNA, 51 bp, Homo sapiens
ggacagcaaaataattttgcaaaacratcacattttaaaatcagctttttg

SEQ ID NO: 1508 - DNA, 51 bp, Homo sapiens
gacgaggggaaaacaggagcttaaamgaattaaaacatgttggggagtggt

SEQ ID NO: 1509 - DNA, 51 bp, Homo sapiens
aagacacaggatactacagaaatgcwctatgatctattgtaatgctgtttg

SEQ ID NO: 1510 - DNA, 51 bp, Homo sapiens
cttcttatcataatcatatttttccrataccagaatcaaggtgcactgtgt

SEQ ID NO: 1511 - DNA, 51 bp, Homo sapiens
taactccctagccatatactcttaastaagctgaaggcaagcagggccttc

SEQ ID NO: 1512 - DNA, 51 bp, Homo sapiens
agccctgctgacccaagttcatcaayatccacgctgttaagacaccattcc

SEQ ID NO: 1513 - DNA, 51 bp, Homo sapiens
gacagagttctcaagacacctttacracagtctggagatggttaggtccct

SEQ ID NO: 1514 - DNA, 51 bp, Homo sapiens
gtcctcaagtctcaggagaaattcaygcttctacagcctctacttctgtgc

SEQ ID NO: 1515 - DNA, 51 bp, Homo sapiens
tacagaggggcccatccactcctaarcgggtctccaggaggcttggtttga

SEQ ID NO: 1516 - DNA, 51 bp, Homo sapiens
tctcttatgactgcaagaaaaggaarcgtagtagaaacatgtagctggaac

SEQ ID NO: 1517 - DNA, 51 bp, Homo sapiens
ctaaagaaaattgaaatcaactgtascttaggaaattcaatatgttgaaat

SEQ ID NO: 1518 - DNA, 51 bp, Homo sapiens
agacaaggaggcaacacaactccacrctttgctgtctgtgtggagactgaa

SEQ ID NO: 1519 - DNA, 51 bp, Homo sapiens
ttcatatgttcctctttctcccaaaygtaaagatcagaaaggcagattaac

SEQ ID NO: 1520 - DNA, 51 bp, Homo sapiens
tacctttctcctgaagatgaattaayaactgaccaattctctggagctgaa

SEQ ID NO: 1521 - DNA, 51 bp, Homo sapiens
attcctcttgatttttctagaactayggtaaagtacaccttccccgtactc

SEQ ID NO: 1522 - DNA, 51 bp, Homo sapiens
tcaataaagtagcaggagaattacaraaagtcacaaatgaatccatccttc

SEQ ID NO: 1523 - DNA, 51 bp, Homo sapiens
aaaccttaatgcttctgcttgtttayctgcaaaatcaatttgtttcataga

SEQ ID NO: 1524 - DNA, 51 bp, Homo sapiens
attgaaagagaaagcataaagtagcraaaatcctttccagattaaaaaacg

SEQ ID NO: 1525 - DNA, 51 bp, Homo sapiens
aaaaggagaaatctttaccttcaaayatatccggacattttactcttcttc

SEQ ID NO: 1526 - DNA, 51 bp, Homo sapiens
agattatgatcaagattaatgtcaaytctaggataaccactaaaaaacagt

SEQ ID NO: 1527 - DNA, 51 bp, Homo sapiens
atgtttgctctagattcttaaggccrctgttcttttcagcatgattttact

SEQ ID NO: 1528 - DNA, 51 bp, Homo sapiens
taactggagcattttattatgcaaaracatttaattggttttgtttaaacc

SEQ ID NO: 1529 - DNA, 51 bp, Homo sapiens
ctctgatattggttctacatgttcasagtaagtccctggtttgggtatatg

SEQ ID NO: 1530 - DNA, 51 bp, Homo sapiens
tgagcttgaatgtatgtgtggttgaycctaaaatattttgatgagtattca

SEQ ID NO: 1531 - DNA, 51 bp, Homo sapiens
ccccaaactcaacaacacaatactgyatgcatttccaattctttatataga

SEQ ID NO: 1532 - DNA, 51 bp, Homo sapiens
tcttatttatcagagtgtgtaaatgyagttatgcaagaatcacgttcattt

SEQ ID NO: 1533 - DNA, 51 bp, Homo sapiens
gctaaattgtattaatatgatacaasagataagatgaaattctaaaataaa

SEQ ID NO: 1534 - DNA, 51 bp, Homo sapiens
gtggaactggaatttcattctcctayggacttgctctgaacaacagttaag

SEQ ID NO: 1535 - DNA, 51 bp, Homo sapiens
cacattaaacactaagctgatactcmaagatatgaattcatcttaaaacaa

SEQ ID NO: 1536 - DNA, 51 bp, Homo sapiens
cctctacctcctagaagccatgctgracgtggggcatctagaagtaacttg

SEQ ID NO: 1537 - DNA, 51 bp, Homo sapiens
acagatagctgtgtaaatcaaggaaktagcagaaaaaaaatgtatacaata

SEQ ID NO: 1538 - DNA, 51 bp, Homo sapiens
aaaggaataacgtaattgtaaatatrggattaaagtgcaagtcccaatttg

SEQ ID NO: 1539 - DNA, 51 bp, Homo sapiens
ggattaccccaaatgaacaaatacartcttttaaaagtgatcactttgcac

SEQ ID NO: 1540 - DNA, 51 bp, Homo sapiens
ataaagcaaccccaaattcatgtaasagatactggttattaaaattcaaca

SEQ ID NO: 1541 - DNA, 51 bp, Homo sapiens
ctagagactcagttaacacagctggraaatatttgaatattgtgttatcag

SEQ ID NO: 1542 - DNA, 51 bp, Homo sapiens
ctccattattacccactgtatcaaaytccttctctattacatttaaccaaa

SEQ ID NO: 1543 - DNA, 51 bp, Homo sapiens
aagatgattttgcttatatgctgagragacatcatgttaggagtgattaca

SEQ ID NO: 1544 - DNA, 51 bp, Homo sapiens
aattgaaatggctgctctgacacacrctacaaagttggaacctgatgcaat

SEQ ID NO: 1545 - DNA, 51 bp, Homo sapiens
tgatgatttgcaaatatagtcaaatraaagtgcatttctaaatggaactga

SEQ ID NO: 1546 - DNA, 51 bp, Homo sapiens
tcaaataaaagtgcatttctaaatgraactgattagactaggttctttgta

SEQ ID NO: 1547 - DNA, 51 bp, Homo sapiens
tgaacagcgattatttaaaagcagayggaacgaaattgatctagaggtggc

SEQ ID NO: 1548 - DNA, 51 bp, Homo sapiens
tattgacctgaatttgtgtgaccgaygaaagcagaattaaaaactgcctgg

SEQ ID NO: 1549 - DNA, 51 bp, Homo sapiens
agggaaggggaaaaatgtatctctayaggaaaacaaaaggaatcttggctt

SEQ ID NO: 1550 - DNA, 51 bp, Homo sapiens
aatggaaataattttattcttctaartgactcctagttgcttttgtacaca

SEQ ID NO: 1551 - DNA, 51 bp, Homo sapiens
aacaagaaatgggtcaggaagaataygagccttgtccttgcagattttctc

SEQ ID NO: 1552 - DNA, 51 bp, Homo sapiens
taaggtagttatcacaggtttataamgaagagagtgatatgatgaaaaata

SEQ ID NO: 1553 - DNA, 51 bp, Homo sapiens
ttcaaatctctttctacactcaaaartcatgaggaacatgcaagtgaaaga

SEQ ID NO: 1554 - DNA, 51 bp, Homo sapiens
gtgtgtgtgtgatctgccttgtgatmaaacttgcctgtacagacacttaca

SEQ ID NO: 1555 - DNA, 33 bp, Homo sapiens
ttgacctcttgccttayaacctttgcttcttcc

SEQ ID NO: 1556 - DNA, 51 bp, Homo sapiens
ctctgttgagatcgcataattgctayagatatgtttccaagttaactggtg

SEQ ID NO: 1557 - DNA, 51 bp, Homo sapiens
caattccattgacaaagggttgaagscttactggcacaagaagcttaagca

SEQ ID NO: 1558 - DNA, 51 bp, Homo sapiens
tgtcatcagtgatgcagttctgttayctcatcttcacaattccatctgata

SEQ ID NO: 1559 - DNA, 51 bp, Homo sapiens
ctcagaaccactaccatagccttctraaaagtcaattttcttcatagtctc

SEQ ID NO: 1560 - DNA, 51 bp, Homo sapiens
caactattgaagtggtaaattagagrctatgaagaaaattgacttttcaga

SEQ ID NO: 1561 - DNA, 51 bp, Homo sapiens
ttcatagtctctaatttaccacttcmatagttgccaactaactataatata

SEQ ID NO: 1562 - DNA, 51 bp, Homo sapiens
ccaactaactataatatatattccawattgctttgattgatatctcagatc

SEQ ID NO: 1563 - DNA, 51 bp, Homo sapiens
actttattttagttggcaatattaayacccatttcagaaactcctttatct

SEQ ID NO: 1564 - DNA, 51 bp, Homo sapiens
acagaattctactcatatcaaacaaygagtggagtttcagaaggcaaacaa

SEQ ID NO: 1565 - DNA, 51 bp, Homo sapiens
ttttcatcccttaatatactgtaatsaatctacctctaggtaaagagttct

SEQ ID NO: 1566 - DNA, 51 bp, Homo sapiens
tagctgagaccaagagaatattgtayagaccttgttagaataactcttagc

SEQ ID NO: 1567 - DNA, 51 bp, Homo sapiens
cttccaatgaagagacagaattagakacaagaacagaacaaaaggtttagg

SEQ ID NO: 1568 - DNA, 51 bp, Homo sapiens
tatatgtcattcattcattccaggarcttctactgagcagttatcatgcca

SEQ ID NO: 1569 - DNA, 51 bp, Homo sapiens
actgtcctctttcaaaatgtgttcayggttgttacataatgctggatcttg

SEQ ID NO: 1570 - DNA, 51 bp, Homo sapiens
ttgttcatatatatttaaaatatggycaaatctacctgaaaagtagcactg

SEQ ID NO: 1571 - DNA, 51 bp, Homo sapiens
caaatgctcaacctcaaccaattctrtgaaaacaagcgatcctgccctctc

SEQ ID NO: 1572 - DNA, 51 bp, Homo sapiens
atacattttttcttttaaaaaatgamgagtctgtcaaaacctggcctacgt

SEQ ID NO: 1573 - DNA, 51 bp, Homo sapiens
tctccaaatcatacatatttcttgaygagtaggtatcagagtctcttagac

SEQ ID NO: 1574 - DNA, 51 bp, Homo sapiens
ttcaattttgctcccttttcaaccaycttaggcattcgtttttaataagtc

SEQ ID NO: 1575 - DNA, 51 bp, Homo sapiens
gaaagattactcgatttcttctcaawaattgtatttgttctggcacattct

SEQ ID NO: 1576 - DNA, 51 bp, Homo sapiens
atctggcatctccaccttttgaagasgcatctggacttctcctaaagagta

SEQ ID NO: 1577 - DNA, 51 bp, Homo sapiens
acagctgggagaactgaggtctgaayataaatagtaatgtttctcctactc

SEQ ID NO: 1578 - DNA, 51 bp, Homo sapiens
atattagtcttattactaattttcasgtcttttgctgggagatgctttaag

SEQ ID NO: 1579 - DNA, 51 bp, Homo sapiens
tgtcttcctccctctttattgggcasagtcttggttctccactctggatgc

SEQ ID NO: 1580 - DNA, 51 bp, Homo sapiens
gcccattggaatcagcatcttaaagwctgtccactgggcacaataggccca

SEQ ID NO: 1581 - DNA, 51 bp, Homo sapiens
aaagaggtaatttcttcacaacacayggaaataagagtatctctaggaatt

SEQ ID NO: 1582 - DNA, 51 bp, Homo sapiens
attgagtgcacctggagcaaaaaaargtcttgacacgaaaaaatatatata

SEQ ID NO: 1583 - DNA, 51 bp, Homo sapiens
ttgccctggtatctctcttcagtcaktatatggcaagtcattattccagta

SEQ ID NO: 1584 - DNA, 51 bp, Homo sapiens
attcttcttgatgtagcagtttacartattacacctttagggaaaataaca

SEQ ID NO: 1585 - DNA, 51 bp, Homo sapiens
tgtgcattcaaatcaggtttccccastataaaaatgtagaggaggatacat

SEQ ID NO: 1586 - DNA, 51 bp, Homo sapiens
aggtaaaatgtgacataagcggatamtataaaatagcaataaattgtgcat

SEQ ID NO: 1587 - DNA, 51 bp, Homo sapiens
atttgtgtttgtttagtgatgaaaartctccaatattaatattaatctttt

SEQ ID NO: 1588 - DNA, 51 bp, Homo sapiens
aaccaccaaccacaggatatatatcrttctcagctggacaagaaacatact

SEQ ID NO: 1589 - DNA, 51 bp, Homo sapiens
caaaaattgactaagaagattatgcracattgctcagaaatcccattcaat

SEQ ID NO: 1590 - DNA, 51 bp, Homo sapiens
tggaagaaaatcataaagtgcatcaktataaaacaaataaaggtaattagt

SEQ ID NO: 1591 - DNA, 51 bp, Homo sapiens
aggaaggaaagcaaagaaagaatcargtaaaggtacaagtaaaagggaatt

SEQ ID NO: 1592 - DNA, 51 bp, Homo sapiens
caaccatgtgccctcttgagtctatycttgtctctgtaatgattagcaggt

SEQ ID NO: 1593 - DNA, 51 bp, Homo sapiens
atgtctttcccatctcaattacaccractccatctgtttagtggttcaggc

SEQ ID NO: 1594 - DNA, 51 bp, Homo sapiens
gagaataccagtccttcaggattaargccccattcttataactttatttaa

SEQ ID NO: 1595 - DNA, 51 bp, Homo sapiens
gttttgtatcccaatttatgtctacrgaatacaaaagttctttgcaatggg

SEQ ID NO: 1596 - DNA, 51 bp, Homo sapiens
atgaaaattgtactaacctcctcaarcaaataagatctgttcttactttgc

SEQ ID NO: 1597 - DNA, 51 bp, Homo sapiens
caccatactgtgtaatagatcacaakagcttatcccttttgcctaactgaa

SEQ ID NO: 1598 - DNA, 51 bp, Homo sapiens
aattctgttttcatcaaatgaaaccraaaggaattacagccaaataatgct

SEQ ID NO: 1599 - DNA, 51 bp, Homo sapiens
tggccaagctgagaatcacttataawaagctgtcaaatttaatgaccacac

SEQ ID NO: 1600 - DNA, 51 bp, Homo sapiens
taagtggcatcgcctataatgagcascgtgttctcctaccaccttagctgc

SEQ ID NO: 1601 - DNA, 51 bp, Homo sapiens
taaataaaaagcaccagaaatattamatttttagttcaaagattattcact

SEQ ID NO: 1602 - DNA, 51 bp, Homo sapiens
gggattagttaactaaatgatggtamacctacggacagaacactgcagtgg

SEQ ID NO: 1603 - DNA, 51 bp, Homo sapiens
atattttattgttgctctcgatcaasatgcgttcttaaaatattggactag

SEQ ID NO: 1604 - DNA, 51 bp, Homo sapiens
ttggtccaatacaaaaagccaataawtcaaagtcaggagcctagatccgag

SEQ ID NO: 1605 - DNA, 51 bp, Homo sapiens
ggtccaacaatctgttgcatggtaargcttgagaaccatgagtataatgaa

SEQ ID NO: 1606 - DNA, 51 bp, Homo sapiens
taattttcagaaaaattgtgctacarctaggatgtgatatttaattatttg

SEQ ID NO: 1607 - DNA, 51 bp, Homo sapiens
aacttttgtgtgtagggttgctttgmagtattcttttattgcctttcattg

SEQ ID NO: 1608 - DNA, 51 bp, Homo sapiens
aaaaaaaattatgtgtagacctcacrgatgcttatgggttgaaactggctt

SEQ ID NO: 1609 - DNA, 51 bp, Homo sapiens
atattcacagagaattgtcttccaamagggactcttaggtgtgaagtgagg

SEQ ID NO: 1610 - DNA, 51 bp, Homo sapiens
ttattatgaagtacatgaataaatcrccacccaaatacagtaaatgcattg

SEQ ID NO: 1611 - DNA, 51 bp, Homo sapiens
atagagcacatatttaagacaccggkaggcattaggtctaagggctagaat

SEQ ID NO: 1612 - DNA, 51 bp, Homo sapiens
tgggacctctgcttttccttaatttyctcactgccataattagcatggatg

SEQ ID NO: 1613 - DNA, 51 bp, Homo sapiens
cacatcatatatttagagattcatayagttgattttgatttttaaaatata

SEQ ID NO: 1614 - DNA, 51 bp, Homo sapiens
gttcctgttttcccattgtaaatccrcaggcttccttatctcctcatctgt

SEQ ID NO: 1615 - DNA, 51 bp, Homo sapiens
ggaacccccagatgaagtaggtgacragcactcttagaagttaccataaaa

SEQ ID NO: 1616 - DNA, 51 bp, Homo sapiens
tgcctgcatcctccttggagcaatcycatagtttccaagggtcccagaggc

SEQ ID NO: 1617 - DNA, 51 bp, Homo sapiens
cactagaaatggtacccaagaattamcacgatgacttcaagagctctgatg

SEQ ID NO: 1618 - DNA, 51 bp, Homo sapiens
aaagtgaccacactgcttctaagtcraggtgaaagtgctgacagtgaattt

SEQ ID NO: 1619 - DNA, 51 bp, Homo sapiens
tcatcacttcttaggtttgttcaacrctagtttcttatgttgccaatatgt

SEQ ID NO: 1620 - DNA, 51 bp, Homo sapiens
aaatctgacttctcctacttcaatayagacaacctttcatcatggagaagg

SEQ ID NO: 1621 - DNA, 51 bp, Homo sapiens
ttttaatcctctactaacacaagggraataattttacataatttacttcag

SEQ ID NO: 1622 - DNA, 51 bp, Homo sapiens
taaaaaattagtctttgcctcccaayggacaggatttcctagatagccttg

SEQ ID NO: 1623 - DNA, 51 bp, Homo sapiens
ttatgtttttttaagagacagaggasatcaagagttaaatttgatgcttaa

SEQ ID NO: 1624 - DNA, 51 bp, Homo sapiens
ttttcaggggacaagattgccttacwatttatagagactagagaaaactta

SEQ ID NO: 1625 - DNA, 51 bp, Homo sapiens
aaaactattaatgggttctcatcacraattcaactaaattcaaacttcggg

SEQ ID NO: 1626 - DNA, 51 bp, Homo sapiens
ataaatattaaaggtaaaacataaayactgtgcagacggtgatagatatgt

SEQ ID NO: 1627 - DNA, 51 bp, Homo sapiens
taagacccagatataattcatcaaartcaaatacgtttaattgctttgtaa

SEQ ID NO: 1628 - DNA, 51 bp, Homo sapiens
tgataaagatgattttctgtaggtascagacgatataattaccagcattag

SEQ ID NO: 1629 - DNA, 51 bp, Homo sapiens
gccactggattcaattgtgcacgaarccatataagttatgtggaccaagac

SEQ ID NO: 1630 - DNA, 51 bp, Homo sapiens
tgcccattcaattattgcttaagaaygtttagtccacctgaccccatagct

SEQ ID NO: 1631 - DNA, 51 bp, Homo sapiens
aacatgttatcccattcttcataaasctgtggaagtcattctaattatatt

SEQ ID NO: 1632 - DNA, 51 bp, Homo sapiens
ttcctaaataagtgagtattaaagaygaaagtgatttagacaatctattgg

SEQ ID NO: 1633 - DNA, 51 bp, Homo sapiens
caacttataagagcataattaaaacrctcacttcacagctctaccttccac

SEQ ID NO: 1634 - DNA, 51 bp, Homo sapiens
cagcaggaggcagaaaactactcaaytgtggtcatgtatctgaaggatata

SEQ ID NO: 1635 - DNA, 51 bp, Homo sapiens
tacaatgctgtaataacacaagctamctttttgcaacattttgctttatag

SEQ ID NO: 1636 - DNA, 51 bp, Homo sapiens
aaaggtacagttgttaatatttatayggagccattaagtgtacactagaac

SEQ ID NO: 1637 - DNA, 51 bp, Homo sapiens
aatgtgagtctcccatgcataaagargagagaatagtccttccatttccca

SEQ ID NO: 1638 - DNA, 51 bp, Homo sapiens
atgtctctcattgaatgaatctccaygtcacaatttcaaaaagtacaatca

SEQ ID NO: 1639 - DNA, 51 bp, Homo sapiens
catggctccacctcagggagctgacmgatggtgatttattccacaaaatat

SEQ ID NO: 1640 - DNA, 51 bp, Homo sapiens
ctgacaggtttgttgatggactagaygttgatggaaatttgaaggaaaaac

SEQ ID NO: 1641 - DNA, 51 bp, Homo sapiens
caaatgctgattatggtgactttgcragaaaaataggacatgatcttcttg

SEQ ID NO: 1642 - DNA, 51 bp, Homo sapiens
ggagcagcatacccacaaatcatgaycgtaggacacagcaagtgtcaggag

SEQ ID NO: 1643 - DNA, 51 bp, Homo sapiens
ttcttgtttcatttcttaagatagayggagtttcatggtttgagggtccga

SEQ ID NO: 1644 - DNA, 51 bp, Homo sapiens
aaaactgactgcacagaggccttaamccaacaataattatgcagcagtcta

SEQ ID NO: 1645 - DNA, 51 bp, Homo sapiens
accgtaatcttttgagctctgataayattttgtgtctctatcataagacat

SEQ ID NO: 1646 - DNA, 51 bp, Homo sapiens
ttataggatgcagaatagaccaaaaktggatcatgacgtgtctattcaaac

SEQ ID NO: 1647 - DNA, 51 bp, Homo sapiens
ccacgcaagctttggtatgctgcackctctccaaacagtatggctaccctg

SEQ ID NO: 1648 - DNA, 51 bp, Homo sapiens
tagacatttcatataaatggaataaygacgtgtggtctatcgggtgtggct

SEQ ID NO: 1649 - DNA, 51 bp, Homo sapiens
tacctttttttttggtaattgggatragacagtaaggaaagaaacatgact

SEQ ID NO: 1650 - DNA, 51 bp, Homo sapiens
gcaatttatcatataccttgattaaytgagagaacaaccaaccatactatc

SEQ ID NO: 1651 - DNA, 51 bp, Homo sapiens
tgattcgtgcataggaatgtcctaaycctttggctgtttctcaaattttgc

SEQ ID NO: 1652 - DNA, 51 bp, Homo sapiens
accatggagaaccctggtttgcttayagaatcacttgtgtaaacagaaaat

SEQ ID NO: 1653 - DNA, 51 bp, Homo sapiens
aagtatgtagtaagagaataagatasaaaagtcacctaagaaagtgtatgg

SEQ ID NO: 1654 - DNA, 51 bp, Homo sapiens
atatacttaatttctgatattaccayctttaggctcctatgttttcttaaa

SEQ ID NO: 1655 - DNA, 51 bp, Homo sapiens
acattctcccaataaatactcagaaytactatcagcttaggccaaggcatg

SEQ ID NO: 1656 - DNA, 51 bp, Homo sapiens
gcctggcacacagaaggtacctaatyaatgcttattggatcactgggtagc

SEQ ID NO: 1657 - DNA, 51 bp, Homo sapiens
aaacaatgaataactttgtgcacttracccatctgtagaaaaccatctgtg

SEQ ID NO: 1658 - DNA, 51 bp, Homo sapiens
ttattgcaaaactagaaaattactaytaaatgttctaacatcaactggagg

SEQ ID NO: 1659 - DNA, 51 bp, Homo sapiens
atcattagatacataacccttataaytccagagacataagtgggtcagtct

SEQ ID NO: 1660 - DNA, 51 bp, Homo sapiens
tgagaaacttaaatatggcatttagsatagcaaaaaaaaaaaaaaatcaca

SEQ ID NO: 1661 - DNA, 51 bp, Homo sapiens
ttattcaacaaaagtatcataagaaragtggcttagtctcaccctcctacc

SEQ ID NO: 1662 - DNA, 51 bp, Homo sapiens
gttttccaaatgttcacttttaacaygggcatccatttatacaacaaagga

SEQ ID NO: 1663 - DNA, 51 bp, Homo sapiens
ttcctgttctaaaattaactggcaartcattctagcatctcccttcagata

SEQ ID NO: 1664 - DNA, 51 bp, Homo sapiens
ttccaaatcaccataagattaggtayaactcaaggagagatgcaaataacc

SEQ ID NO: 1665 - DNA, 51 bp, Homo sapiens
ggtgcacaatctttctactgcaactsacaaacaacagtcaaaagccctatg

SEQ ID NO: 1666 - DNA, 51 bp, Homo sapiens
gattgctgcaatgcttagtgactacrgctattcacgtatcccacatgtgta

SEQ ID NO: 1667 - DNA, 51 bp, Homo sapiens
gagatgaccaccgagtttttaataartggtctgagagggtacaatttgatc

SEQ ID NO: 1668 - DNA, 51 bp, Homo sapiens
actttgaacatttgcattactagccrgattcctggaaacattttaacgtgg

SEQ ID NO: 1669 - DNA, 51 bp, Homo sapiens
acccaacccatctggttattatccayatgaggacaattggagcctcttcta

SEQ ID NO: 1670 - DNA, 51 bp, Homo sapiens
aaagatagcacgatttaaggaccggygttgctttctgactaggtctgtcaa

SEQ ID NO: 1671 - DNA, 51 bp, Homo sapiens
atgactctggctgaatttgcattaakgatttcctaccagggttgccaagtg

SEQ ID NO: 1672 - DNA, 51 bp, Homo sapiens
tgcttgtgccaaggcagtggcattcrcttaaggacataggtcagcccacta

SEQ ID NO: 1673 - DNA, 51 bp, Homo sapiens
tgtcgtcttccatctgtttgctgcaygatctgaatgttcctttctgtggtc

SEQ ID NO: 1674 - DNA, 51 bp, Homo sapiens
aggtggctacgtgctcttcccaggcraccgttcattcgtttctctatttgt

SEQ ID NO: 1675 - DNA, 51 bp, Homo sapiens
ctgataaccttgttagtaggaggacrctcatttgtgcatggaacaagacag

SEQ ID NO: 1676 - DNA, 51 bp, Homo sapiens
gaaatactgctctaaacctcaatctycctgttatagaaagtgggaatcata

SEQ ID NO: 1677 - DNA, 51 bp, Homo sapiens
aacaaacatattgatcataccgataygagatgtcagggacttaattcatga

SEQ ID NO: 1678 - DNA, 51 bp, Homo sapiens
agataaagcaagcacttagcatcacrctctgcatgcagtgcacacttgtaa

SEQ ID NO: 1679 - DNA, 51 bp, Homo sapiens
tgcatgcagtgcacacttgtaaagaygagtgatgttatcgttacagcggag

SEQ ID NO: 1680 - DNA, 51 bp, Homo sapiens
agaactcaactcctgagtcctagcasatgtcaagaatgatggagtcgccaa

SEQ ID NO: 1681 - DNA, 51 bp, Homo sapiens
agtgtacataaagattattttaaacsaaagacacctgaaattcaacagatg

SEQ ID NO: 1682 - DNA, 51 bp, Homo sapiens
ccaacacaatgttgaagaagaagaasaagtcggaggactgatactacccaa

SEQ ID NO: 1683 - DNA, 51 bp, Homo sapiens
ggagcatacttcatttaagggtttaycagcttgactgaacaacttgaaaat

SEQ ID NO: 1684 - DNA, 51 bp, Homo sapiens
tgcacagcagtatagggtaccagtcmgagtcatgaggccccctttccaggc

SEQ ID NO: 1685 - DNA, 51 bp, Homo sapiens
ttcctcctcctgccattatactggasgtgttagaattctatcccacattgc

SEQ ID NO: 1686 - DNA, 51 bp, Homo sapiens
gtgattttaagggccacgtgcactaygcgaaaaagagttagctttgaaaac

SEQ ID NO: 1687 - DNA, 51 bp, Homo sapiens
tccacacagaagttgtataccagtckgaaactctgctttgccatctgaaaa

SEQ ID NO: 1688 - DNA, 51 bp, Homo sapiens
aaattgttctttattaggggccaagwatataaacatagaagaaaggaaaaa

SEQ ID NO: 1689 - DNA, 51 bp, Homo sapiens
gagagataagcaaactgactttgcarcataaagcaaaaccatattctctgc

SEQ ID NO: 1690 - DNA, 51 bp, Homo sapiens
ctccccaacagttaagccaagaaatsaattataaaaatgtacttcagtcac

SEQ ID NO: 1691 - DNA, 51 bp, Homo sapiens
cacatttgaattagccatatcgaaarttcaaatattcttccatttggcatt

SEQ ID NO: 1692 - DNA, 51 bp, Homo sapiens
ccagcccaaattactttttaacagaycatgtggtatagacggaagtgcttg

SEQ ID NO: 1693 - DNA, 51 bp, Homo sapiens
cggaattttaaaacctaatatgaagraaataatgtaaaatatctcatgaat

SEQ ID NO: 1694 - DNA, 51 bp, Homo sapiens
ccaaggtaagtgacaggcccttccaracaattaagagcctgattattgagg

SEQ ID NO: 1695 - DNA, 51 bp, Homo sapiens
cctgcttattcaattaatcacttaaytgatcatgctgtcatctttttctgc

SEQ ID NO: 1696 - DNA, 51 bp, Homo sapiens
acagaggcttaaggaaatatacccaygatcacaaaccagataagtggcaga

SEQ ID NO: 1697 - DNA, 51 bp, Homo sapiens
gctaatgtctaccatgattacctccraacagctcttaggcatatagcaata

SEQ ID NO: 1698 - DNA, 51 bp, Homo sapiens
gtgtggagtttacagaaacactcagraataaccaccagaaaaaagtaatgc

SEQ ID NO: 1699 - DNA, 51 bp, Homo sapiens
gagatatggggacttgttcaaaacasaaagagaccctgtagctgttattgg

SEQ ID NO: 1700 - DNA, 51 bp, Homo sapiens
agtccctacatattaaactgtagaayaggagtgagatgaattatccatgcc

SEQ ID NO: 1701 - DNA, 51 bp, Homo sapiens
tgtgaagtgaaatgagataatcctcrtaaatccctaagcactgcacctggc

SEQ ID NO: 1702 - DNA, 51 bp, Homo sapiens
atgctaaatatatggtcttttttcawtctacactctgataaccaaaaatcc

SEQ ID NO: 1703 - DNA, 51 bp, Homo sapiens
tcttagcttgagtttttccaacgcasatgatgatacagcctcatgggggtt

SEQ ID NO: 1704 - DNA, 51 bp, Homo sapiens
agcttactatgcttgacttcagttayattccccagtaccaagaacgcagga

SEQ ID NO: 1705 - DNA, 51 bp, Homo sapiens
caattaaggacaagattagcagagakgaggaatttatggtgaaaatgcaat

SEQ ID NO: 1706 - DNA, 51 bp, Homo sapiens
tctcccaacttccctttttataagaygcagatatgagtgctcagtatagaa

SEQ ID NO: 1707 - DNA, 51 bp, Homo sapiens
ttataaaaagggaagttgggagacayggttaagagttaatggaaaaaacag

SEQ ID NO: 1708 - DNA, 51 bp, Homo sapiens
tgaaatttaagtaacgtttgcatggracagtctcaaacttcagaaagattc

SEQ ID NO: 1709 - DNA, 51 bp, Homo sapiens
gggaacagtcacctgggtgaaagccrtgtgctcttcctggtctgcgatgct

SEQ ID NO: 1710 - DNA, 51 bp, Homo sapiens
caggcatcttctcagcatttggcaamagtgtttgttctgaagccaggacag

SEQ ID NO: 1711 - DNA, 51 bp, Homo sapiens
tttcagcccccacctgctgcccagcsaggtgtccttgttcaggccaccacc

SEQ ID NO: 1712 - DNA, 51 bp, Homo sapiens
gtatgcagaggtcatactggattagmgtaggccttaagtccaatatgactg

SEQ ID NO: 1713 - DNA, 51 bp, Homo sapiens
cctgggggctggagagttggggtacrcctcttgccaccgctgagtgggagc

SEQ ID NO: 1714 - DNA, 51 bp, Homo sapiens
aataagaaacacaagggagagagccragaatctgccttttagggtgcggag

SEQ ID NO: 1715 - DNA, 51 bp, Homo sapiens
gtgctgtgtcacaaatttctttgtaygcctcttgggctaccgtggttttct

SEQ ID NO: 1716 - DNA, 51 bp, Homo sapiens
ttaaaaagaaattttagaaacttgckatctattaactcagggtaacaggga

SEQ ID NO: 1717 - DNA, 51 bp, Homo sapiens
gattttgttggctttagccctagtarataaggattcttgttgaatttagtc

SEQ ID NO: 1718 - DNA, 51 bp, Homo sapiens
tgagcttttcttcaagataaagatcrcacagaattttgtgtttaccaggtc

SEQ ID NO: 1719 - DNA, 51 bp, Homo sapiens
gaggaaacaaagcaaatcacacaaawcttccaaagaaggcaatgaaaaaga

SEQ ID NO: 1720 - DNA, 51 bp, Homo sapiens
cccataggccagtgaaatggatccartaagacataactaacttcagtttct

SEQ ID NO: 1721 - DNA, 51 bp, Homo sapiens
tttctattgatgttttcatagcaaarattagtgtatctgtaattttctgtt

SEQ ID NO: 1722 - DNA, 51 bp, Homo sapiens
gaaatgaggagataatatctcgaaamctttaatgtatgcttacctaaaagt

SEQ ID NO: 1723 - DNA, 51 bp, Homo sapiens
cttaattagtatgcttgctcttactyaaaatgctccacgcaccttttgcag

SEQ ID NO: 1724 - DNA, 51 bp, Homo sapiens
cagtctagggaatgggaatgatgccyaaatacttgtgttgcttttgttacc

SEQ ID NO: 1725 - DNA, 51 bp, Homo sapiens
aagtgattcgttttaacattcccaascaataactagttctacacaaaacga

SEQ ID NO: 1726 - DNA, 51 bp, Homo sapiens
acagagacacaaaacttctgtgattraaacagaaccagaggcaggatcaga

SEQ ID NO: 1727 - DNA, 51 bp, Homo sapiens
tgtctgcttttcttcatatctctcartctagtgtataattcaacactgttt

SEQ ID NO: 1728 - DNA, 51 bp, Homo sapiens
attagatagctgaggaacaagttagratgtaattaaccaacggacaccaag

SEQ ID NO: 1729 - DNA, 51 bp, Homo sapiens
agaaactattttatcagtcaatcgawcttagcaaataatgcccaatctttc

SEQ ID NO: 1730 - DNA, 51 bp, Homo sapiens
ctgcactgacagatctcaaactccartgatggtcttcctaatacactgaga

SEQ ID NO: 1731 - DNA, 51 bp, Homo sapiens
taaaagcatttagtatcataactagwatcctgtaagtgctcaatcattggt

SEQ ID NO: 1732 - DNA, 51 bp, Homo sapiens
cagaccttcactcaagccaaccatamaaaattatcaatgcaaccaacaaga

SEQ ID NO: 1733 - DNA, 51 bp, Homo sapiens
ctgcccagttcatccagtccataccyatgtttcctttagggctcatcctgc

SEQ ID NO: 1734 - DNA, 51 bp, Homo sapiens
cctaagcttatgatgatgagttatgwatgccaaatacttatctgaagagtt

SEQ ID NO: 1735 - DNA, 51 bp, Homo sapiens
tcacatcgcctttgttatgtccagasgagaggcataaaaaggcactctccc

SEQ ID NO: 1736 - DNA, 51 bp, Homo sapiens
gtttccccaggttgaatgctcttacyactggcgcacatacattaaagagct

SEQ ID NO: 1737 - DNA, 51 bp, Homo sapiens
agcttagagcaattttaaaatagcawccagtggaataaacacaccaatggc

SEQ ID NO: 1738 - DNA, 51 bp, Homo sapiens
agtttagcgtatgtttgactaacaaraattccctacatcagagactctagg

SEQ ID NO: 1739 - DNA, 51 bp, Homo sapiens
gagcctagactgtttgggcttcgaaygtaactgacatctttgggaagacgg

SEQ ID NO: 1740 - DNA, 51 bp, Homo sapiens
ataaccatagtcttcctaaagataaygaccctaatgcaataggtagacact

SEQ ID NO: 1741 - DNA, 51 bp, Homo sapiens
cagaccatcaccttcttatacctcaraatagtctgcagggtgactcagaag

SEQ ID NO: 1742 - DNA, 51 bp, Homo sapiens
taacgctactgttataatgttggtayaaacaaagtgtggtgggaaaccaag

SEQ ID NO: 1743 - DNA, 51 bp, Homo sapiens
acttagacttgccaaggcctccgggwacactgctctaatattcagcacctt

SEQ ID NO: 1744 - DNA, 51 bp, Homo sapiens
agtcatgcactttggggaagtaatayacatctgagaagttaaacagaggta

SEQ ID NO: 1745 - DNA, 51 bp, Homo sapiens
gggaaaaaacaactctgaatcccaaygcatgaacaaaattgcagttaggat

SEQ ID NO: 1746 - DNA, 51 bp, Homo sapiens
ctcaccttgggtgtttcctgattcartccatcttccacactgcccccagat

SEQ ID NO: 1747 - DNA, 51 bp, Homo sapiens
atgcgtaacattcaagtagagacgasaacctgtgttaatattaggtcagcg

SEQ ID NO: 1748 - DNA, 51 bp, Homo sapiens
ttatcttttaaagggaaaatgtacargctgcaagaaattctctgtactggg

SEQ ID NO: 1749 - DNA, 51 bp, Homo sapiens
tgctccttgaggcaggtcaggaatawaaactgcataatggtttctctttat

SEQ ID NO: 1750 - DNA, 51 bp, Homo sapiens
attctgccggggtttcttgagtcacygagcatatggggcttcaggttggac

SEQ ID NO: 1751 - DNA, 51 bp, Homo sapiens
gtcatgctgaattgcaaatccctagycggaacatttgaacatcatctagag

SEQ ID NO: 1752 - DNA, 51 bp, Homo sapiens
ttcaaaatcagttgtttaagaaaacsattacacctataccttcaatatcaa

SEQ ID NO: 1753 - DNA, 51 bp, Homo sapiens
ttcttgaaatcacccggattcgaaaygtccagtatcattcttggctcttcc

SEQ ID NO: 1754 - DNA, 51 bp, Homo sapiens
tcactgttgaaagaacctaatcctawctgccttatctacacagcagtaatt

SEQ ID NO: 1755 - DNA, 51 bp, Homo sapiens
ggagggggaaatgtagattgtagaaytgaaaacatttgtgttagtatagtg

SEQ ID NO: 1756 - DNA, 51 bp, Homo sapiens
tgtacccattactgtctccttaaacygtgtactcttcaagggccagccatg

SEQ ID NO: 1757 - DNA, 51 bp, Homo sapiens
agattgcctgtctgattttgcagaaktagctccaacatggttttggtaaca

SEQ ID NO: 1758 - DNA, 51 bp, Homo sapiens
catttgtctgcataaaggcattctcrggtagcagcatggggttgacagcat

SEQ ID NO: 1759 - DNA, 51 bp, Homo sapiens
aatatcaagaataaagattgtaaaarctcctaagaggaagaaaacagtcac

SEQ ID NO: 1760 - DNA, 51 bp, Homo sapiens
gtgtgttcctaacacagatatgggaygattttccaaatgtatgtggaggac

SEQ ID NO: 1761 - DNA, 51 bp, Homo sapiens
agaagcaagagtttaagtagcaacaragtcagctgaggatttatctggatc

SEQ ID NO: 1762 - DNA, 51 bp, Homo sapiens
cttaggctcagaaggcttttgttaaktattactttctacagcttgaaatag

SEQ ID NO: 1763 - DNA, 51 bp, Homo sapiens
gtgtccttgtcacaatacactttccratctccgaggcaggcagaggcttta

SEQ ID NO: 1764 - DNA, 51 bp, Homo sapiens
agtaacagtgaatcgccccttgcaaygtacaaccacagtacgctagcttcc

SEQ ID NO: 1765 - DNA, 51 bp, Homo sapiens
ttagtgcagagggccctacacaatastaacaaaacactgggaaatgtcatt

SEQ ID NO: 1766 - DNA, 51 bp, Homo sapiens
atgtatagaagcttgtaatagtaaayaatttggtaaacagcaaagagtaaa

SEQ ID NO: 1767 - DNA, 51 bp, Homo sapiens
aattagaagggccaggtttaaccaargctcaacaccagccatgtcccccgg

SEQ ID NO: 1768 - DNA, 51 bp, Homo sapiens
catggctgtgaagtgttcaagtctayagagatttggaaggttttggttttt

SEQ ID NO: 1769 - DNA, 51 bp, Homo sapiens
tgccacgtagtgttaccatcctgccrttcagaggagggaagtggggcacag

SEQ ID NO: 1770 - DNA, 51 bp, Homo sapiens
tggtattcctggaagctagagaccasaaagtaagcaacgctgaaagtcgca

SEQ ID NO: 1771 - DNA, 51 bp, Homo sapiens
taagagcatgagaggcctttgtaaargtgtcagtggggtgatcagatggca

SEQ ID NO: 1772 - DNA, 51 bp, Homo sapiens
tccaaccagcccatggtggacacacrgaatcatcccatttgacatatgtga

SEQ ID NO: 1773 - DNA, 51 bp, Homo sapiens
gaaactgtacacttaagatacatgcmctttattttaagtttaaaaatacaa

SEQ ID NO: 1774 - DNA, 51 bp, Homo sapiens
agtcgtatacatgacatgacttggarataatagcacaaacaaataacaaaa

SEQ ID NO: 1775 - DNA, 51 bp, Homo sapiens
tagaaattgttttacagttaaatcaygtggtagttcctataaaaagggaag

SEQ ID NO: 1776 - DNA, 51 bp, Homo sapiens
atgatatttcgggagaccacaatgcraagttttatcctcttatagttattc

SEQ ID NO: 1777 - DNA, 51 bp, Homo sapiens
tcttgtctgcacagtgacatcagaaytcagttaaataattaaagactgtta

SEQ ID NO: 1778 - DNA, 33 bp, Homo sapiens
aaaaagcataattaccrgagccaagttgaggta

SEQ ID NO: 1779 - DNA, 51 bp, Homo sapiens
atagcaaaatctaatcttaactaacrcaaagggactaattggatgtcctat

SEQ ID NO: 1780 - DNA, 51 bp, Homo sapiens
tggagtattaacatgtagaactaaaygctttcttgagtcctttgaaccaaa

SEQ ID NO: 1781 - DNA, 51 bp, Homo sapiens
attcaccaccataaaaacacatttargtataaaactcacaggtcttacaaa

SEQ ID NO: 1782 - DNA, 51 bp, Homo sapiens
ggagagggatatctttccttgagacygaattttatttacagccaattcttg

SEQ ID NO: 1783 - DNA, 51 bp, Homo sapiens
ctttgaaggtaaagaaaaagagcttsaaaagattgatgaattcaagaaata

SEQ ID NO: 1784 - DNA, 51 bp, Homo sapiens
atgagatagtttactgtttccaggaygcttacattaccatcagatgtcaca

SEQ ID NO: 1785 - DNA, 51 bp, Homo sapiens
tgtcccattcaatatacctttccaayattatcatccattgctcttgtcctt

SEQ ID NO: 1786 - DNA, 51 bp, Homo sapiens
actgatacagtctccttatctctcaygtttgttaattctataagtacttat

SEQ ID NO: 1787 - DNA, 51 bp, Homo sapiens
tgagaaagtgcctattgctttactarcctgttcattttcatgaaattagaa

SEQ ID NO: 1788 - DNA, 51 bp, Homo sapiens
cataggactgaagtctgcgaaaataytacatgtcttttttatttgcttggt

SEQ ID NO: 1789 - DNA, 51 bp, Homo sapiens
tcagtagagagagactgaattgtaaytgaagagaccaattcatcggaagtt

SEQ ID NO: 1790 - DNA, 51 bp, Homo sapiens
ttggagaaatgctcagtgcaactgaygttatgatttgacctgttacttttt

SEQ ID NO: 1791 - DNA, 51 bp, Homo sapiens
agagagctacttgggaatatctatcwaaaggcttaaataacagatactctg

SEQ ID NO: 1792 - DNA, 51 bp, Homo sapiens
atttcagttgcaaattgaaataaaayggaaacagttcacacagtctttact

SEQ ID NO: 1793 - DNA, 51 bp, Homo sapiens
gagagaaagtgttgctactaaattargagtaaagactgtgtgaactgtttc

SEQ ID NO: 1794 - DNA, 51 bp, Homo sapiens
tagttaagaatagcctttcattgttmttctccagtgcattgatggtgcaca

SEQ ID NO: 1795 - DNA, 51 bp, Homo sapiens
tcagccatcatgatatattacttaargaatacgaacattttagtataaaat

SEQ ID NO: 1796 - DNA, 51 bp, Homo sapiens
ctgaggtggcaagtaagtgactttcycaaattgcagcaatgacagataagg

SEQ ID NO: 1797 - DNA, 51 bp, Homo sapiens
aatgttgtcagtttttctaataatamgtggtgtatcagatgcaatcttatt

SEQ ID NO: 1798 - DNA, 51 bp, Homo sapiens
ctctaatttctattatctaattctcycatgaaggtaagctgtccaaagtaa

SEQ ID NO: 1799 - DNA, 51 bp, Homo sapiens
tcacatgcatgtgaagctgtgcaagracctctgcaaaatgcctttgcccac

SEQ ID NO: 1800 - DNA, 51 bp, Homo sapiens
tcactgattccactgaattacactcwattatactgggtcagtaagcttaaa

SEQ ID NO: 1801 - DNA, 51 bp, Homo sapiens
ataacctgcaaatcatgcagaaaaartataatcatccctcagtatccaggg

SEQ ID NO: 1802 - DNA, 51 bp, Homo sapiens
caatcaaaggacttctaattcatgcwcttatcgtctgaccgaaataaagcc

SEQ ID NO: 1803 - DNA, 51 bp, Homo sapiens
taggatattcatgcctttcctataayaatgttttctgaagttatgtaatat

SEQ ID NO: 1804 - DNA, 51 bp, Homo sapiens
atcacagacttctgagacaaaatcaygctaaggaaatcaaacacttgcccc

SEQ ID NO: 1805 - DNA, 51 bp, Homo sapiens
agacatactaaagcttttaaaacaakccatgtgttagtctcatgaccagga

SEQ ID NO: 1806 - DNA, 51 bp, Homo sapiens
tctttatcctctgaccagaacagaarggaatataatggtgtagtatcacag

SEQ ID NO: 1807 - DNA, 51 bp, Homo sapiens
atccgaatggaggaccaagtaatcayacagcggttacatcgctgacgtcct

SEQ ID NO: 1808 - DNA, 51 bp, Homo sapiens
attacttttaattagagctaataaasatatggatttacatgctggctgaga

SEQ ID NO: 1809 - DNA, 51 bp, Homo sapiens
tcaatgtaactatttattataagaamaccagtgtacacaaaagtgctaata

SEQ ID NO: 1810 - DNA, 51 bp, Homo sapiens
cttatcacatcaagggagttatagaygataatgttggctttgacctcaatt

SEQ ID NO: 1811 - DNA, 51 bp, Homo sapiens
tgtcaatgctataatataatcacacyggcaatctagaaatacctacttccc

SEQ ID NO: 1812 - DNA, 51 bp, Homo sapiens
agtctcatgcagagttggtgactaayatccttcactctagcttgaaagccc

SEQ ID NO: 1813 - DNA, 51 bp, Homo sapiens
atagttacacatcaccgtattgcacrggagaacatattccatatactcttt

SEQ ID NO: 1814 - DNA, 51 bp, Homo sapiens
aaataacctcctgttgtatgttagaygtaccatatttttgtaaacattccc

SEQ ID NO: 1815 - DNA, 51 bp, Homo sapiens
tgatagagtggatgtggaaggatacraaaacagagataaaggatgactcca

SEQ ID NO: 1816 - DNA, 51 bp, Homo sapiens
tcttctcctccactatatatgtcatratacacactaatattcagaccacaa

SEQ ID NO: 1817 - DNA, 51 bp, Homo sapiens
aaatgagtagcctgcagtcccagatwaggtcagagttaagtcaacctgagt

SEQ ID NO: 1818 - DNA, 51 bp, Homo sapiens
ctccaagcgattacacaaaataaatmactgaagaaatttctacttaccatc

SEQ ID NO: 1819 - DNA, 51 bp, Homo sapiens
agtccctaccactatttagaaggatwacctgactcacatgaacaaagcaag

SEQ ID NO: 1820 - DNA, 51 bp, Homo sapiens
gaaaaacttgaattggagtttattgragttataagagatcttgtagaccat

SEQ ID NO: 1821 - DNA, 51 bp, Homo sapiens
actacatttcgaagacaagtcaggckgatttctagattaaattcccctgtc

SEQ ID NO: 1822 - DNA, 51 bp, Homo sapiens
atatcattcatagtgacaaatatacwcaagaactatcagggacaaatttga

SEQ ID NO: 1823 - DNA, 51 bp, Homo sapiens
attttgtgttccattgctcctttgakaaataatcactcaccacctcagccc

SEQ ID NO: 1824 - DNA, 51 bp, Homo sapiens
agaactttcccagtcaaaaacatgcygagaattatatactatgtcttaaat

SEQ ID NO: 1825 - DNA, 51 bp, Homo sapiens
ccactagctggatcctctctgtaaayattaggtttctcatctgtaatataa

SEQ ID NO: 1826 - DNA, 51 bp, Homo sapiens
tcagaacgagaacatgatagtctccyatgtcgtgaaagggtttataaacaa

SEQ ID NO: 1827 - DNA, 51 bp, Homo sapiens
ttcagggaaattgtattgagaatagkcccaatttgtttgtagaaagacttc

SEQ ID NO: 1828 - DNA, 51 bp, Homo sapiens
gaataattgggcaaagtttcatttamaacctgatggatgatctgtaaaaga

SEQ ID NO: 1829 - DNA, 51 bp, Homo sapiens
tagaatcatttctgcagctcaaagaraaaactgggtccagaattacaaact

SEQ ID NO: 1830 - DNA, 51 bp, Homo sapiens
gaaagtttatacagaagggtaattcycaatttcttacatttcttccccaca

SEQ ID NO: 1831 - DNA, 51 bp, Homo sapiens
tagctttgtccctttgctaacagtaygaccacaagcccattatgtaaaaat

SEQ ID NO: 1832 - DNA, 51 bp, Homo sapiens
ttctcaggaccaaggtatgcactagrcagagggtaccagcctcctactttc

SEQ ID NO: 1833 - DNA, 51 bp, Homo sapiens
aaacatttctcactaagcatgttttkacctgattttcttcccggtaataca

SEQ ID NO: 1834 - DNA, 51 bp, Homo sapiens
ctggtatctgcaagactgataaatgrgaaaacatgtcataaactgaccatt

SEQ ID NO: 1835 - DNA, 51 bp, Homo sapiens
tatatttaatgtatcaaaatactcarggcaaacattttcctcaaaacaaat

SEQ ID NO: 1836 - DNA, 51 bp, Homo sapiens
atgaatgatatatactgtctccacakataaataaacatattgacatctgcc

SEQ ID NO: 1837 - DNA, 51 bp, Homo sapiens
ctttaaaatgcttatgttgtagcttkaaatctcttatgatgagtaatttat

SEQ ID NO: 1838 - DNA, 51 bp, Homo sapiens
ggacaacatcctccaaggagtaataygcagctaggttgtgtttgccttgac

SEQ ID NO: 1839 - DNA, 51 bp, Homo sapiens
tcctccatgtcagcaaataaaggccrctcttccttccaggaacttctatag

SEQ ID NO: 1840 - DNA, 51 bp, Homo sapiens
ctgcctccctgcatgatgattgtacyggccaagagggaagtgtgtgtgcac

SEQ ID NO: 1841 - DNA, 51 bp, Homo sapiens
acgtcaccagcccgcgtctgtgttcrctgcgtccacttcacagggccaagt

SEQ ID NO: 1842 - DNA, 51 bp, Homo sapiens
aagttggcacgtggcacaaaaaccartcttggcgttcagtgttttgttgag

SEQ ID NO: 1843 - DNA, 51 bp, Homo sapiens
cattgaaacatgatgatacggcctckaagactcccttacttaaaggatcca

SEQ ID NO: 1844 - DNA, 51 bp, Homo sapiens
catatttgtttgaatgcttgtttaayctctgtctgctacaatagagccaag

SEQ ID NO: 1845 - DNA, 51 bp, Homo sapiens
atatataaaaaattttcacaacacartaattttaaaacacaatgaaaaatg

SEQ ID NO: 1846 - DNA, 51 bp, Homo sapiens
gaggagatttccttcctcctcattgyagaacgcagtgggatatcaaagtat

SEQ ID NO: 1847 - DNA, 51 bp, Homo sapiens
ctgttttatcctactcatcctactasatctgggtgtctagaccacttgcat

SEQ ID NO: 1848 - DNA, 51 bp, Homo sapiens
gagcagaaacacagagcccttattayatgatgagcatttatctacatagca

SEQ ID NO: 1849 - DNA, 51 bp, Homo sapiens
caagcaacagtaaatatgccctgaaraaggataatgtgacccagagcttaa

SEQ ID NO: 1850 - DNA, 51 bp, Homo sapiens
atgttctacttagcttttcagtctaygcttggaatcagcaacctgtttcat

SEQ ID NO: 1851 - DNA, 51 bp, Homo sapiens
gctcttggttctcaggcttttggacyctaaggcttatatcaatagcctccc

SEQ ID NO: 1852 - DNA, 51 bp, Homo sapiens
atctgattcatttgaaaacataaaarcgtaggatttagaattgcaaagact

SEQ ID NO: 1853 - DNA, 51 bp, Homo sapiens
ggctgttcttccaagggaaaaaaaakagcaagtctaatgaggagagtgtgt

SEQ ID NO: 1854 - DNA, 51 bp, Homo sapiens
aaggattaccttgcctgttatatagmgcaatcatgaatcatctcctgtggc

SEQ ID NO: 1855 - DNA, 51 bp, Homo sapiens
tttccttcaccttattctattcccarattctcactaatggaaaccaaggct

SEQ ID NO: 1856 - DNA, 51 bp, Homo sapiens
tgtaagtgattctatatgtggttcayagacatagtaaaatcttgaggtaat

SEQ ID NO: 1857 - DNA, 51 bp, Homo sapiens
cccatgttcacagtaccttagtatamgaattaatttgcaaagggatcactt

SEQ ID NO: 1858 - DNA, 51 bp, Homo sapiens
attcatttggtaaatcaattgtttayagtaacacatttaaggaaaatcact

SEQ ID NO: 1859 - DNA, 51 bp, Homo sapiens
gtgaatgccaacccttggatacctastaggcacttggaacctagcatgatc

SEQ ID NO: 1860 - DNA, 51 bp, Homo sapiens
ttaaaagcttggatgagctttagcargtaaaaaatggagagaacctcacct

SEQ ID NO: 1861 - DNA, 51 bp, Homo sapiens
ctctttaaatgcaaaatttctgttasacatagctttaccagtgttttatca

SEQ ID NO: 1862 - DNA, 51 bp, Homo sapiens
atataaccttttggttagatttgtamgaatatgtggactataacagtttta

SEQ ID NO: 1863 - DNA, 51 bp, Homo sapiens
aaatttgagggtatgaacactgctaygttttctttgactccttctttgtct

SEQ ID NO: 1864 - DNA, 51 bp, Homo sapiens
agtatagtacattgtagtaaatgtgyaagaggaagtcctggtggtggataa

SEQ ID NO: 1865 - DNA, 51 bp, Homo sapiens
cctggttaaagtcagtaaaatttcaygggtgagctgatcttttcatagggt

SEQ ID NO: 1866 - DNA, 51 bp, Homo sapiens
aattgcatttgaacacctataatacraaagcaggaaagtaccagggcccct

SEQ ID NO: 1867 - DNA, 51 bp, Homo sapiens
tttaggaaactaggccaaatcttgarcttataatccttaaaggattttgaa

SEQ ID NO: 1868 - DNA, 51 bp, Homo sapiens
gtacattaacatgcaggacaattgayatgttaagaatatttaatacattaa

SEQ ID NO: 1869 - DNA, 51 bp, Homo sapiens
aaaaattttaattttaaaggagatasacaagaaatgagcatgtgtgaaagc

SEQ ID NO: 1870 - DNA, 51 bp, Homo sapiens
actcatgtactgtcctcacataatcracagcctgggaatgagatgtagagg

SEQ ID NO: 1871 - DNA, 51 bp, Homo sapiens
tagcaccatgcttagctgactgtaaygaagcgtagcaggtatggtggtaaa

SEQ ID NO: 1872 - DNA, 51 bp, Homo sapiens
ccaggtcaggggtctaagagaaggarcaaaatgaaacagaacctgtacctt

SEQ ID NO: 1873 - DNA, 51 bp, Homo sapiens
ggtggtggatcaagtgtagttttaaraagcatattcgaaaattactttttt

SEQ ID NO: 1874 - DNA, 51 bp, Homo sapiens
aaaaatgcaggcacataggtcagcayattaggcttaacaacaaatgtttct

SEQ ID NO: 1875 - DNA, 51 bp, Homo sapiens
ctgtaggtctgctttgggaagaaaaygtctgtattgaaaggactgggttta

SEQ ID NO: 1876 - DNA, 51 bp, Homo sapiens
ctactccacaattatcgataaaatasacattaggtgaagtgcaattgctaa

SEQ ID NO: 1877 - DNA, 51 bp, Homo sapiens
agtgtcttcctaatgtgtcacaaaarttgaatcctgtaactagacattaaa

SEQ ID NO: 1878 - DNA, 51 bp, Homo sapiens
ttgcaggaaatagaaatgtccaaggrttgccatttattcaacagctggaag

SEQ ID NO: 1879 - DNA, 51 bp, Homo sapiens
gaactgagatttgaacctaggctgcytggcttcagggtctatgctcttaat

SEQ ID NO: 1880 - DNA, 51 bp, Homo sapiens
ctccatgatgacttaaaatcctaccyagctcgatactgtttcagggccttc

SEQ ID NO: 1881 - DNA, 51 bp, Homo sapiens
gctggtgacattgctactgagtcccraaagaaggaagaaagcaaactggtg

SEQ ID NO: 1882 - DNA, 51 bp, Homo sapiens
ggagaaataactcagcatttgcttakaattcatttattttcggttggggta

SEQ ID NO: 1883 - DNA, 51 bp, Homo sapiens
attttttcatatttcctttcctctckttctaatggcaaagtaaaatgaagt

SEQ ID NO: 1884 - DNA, 51 bp, Homo sapiens
gagaaatagcccagggtgtagagaascgaactgctgtttggaaaaataata

SEQ ID NO: 1885 - DNA, 51 bp, Homo sapiens
ccaacagatttctcttcctgaataascctgatgtcctttacacattgtatt

SEQ ID NO: 1886 - DNA, 51 bp, Homo sapiens
taggaattggtagctgtactgagaarttaggtctcacattcaaaataacac

SEQ ID NO: 1887 - DNA, 51 bp, Homo sapiens
ggatcctttcctttgaatctccatayaacggtagaattgggagtacaaaaa

SEQ ID NO: 1888 - DNA, 51 bp, Homo sapiens
agggcattgactaatttttttccacrcatgttcatatatattaaatggaaa

SEQ ID NO: 1889 - DNA, 51 bp, Homo sapiens
aatgactatcatttcttcaagttagyatcactaccaaatggtgaaaacaag

SEQ ID NO: 1890 - DNA, 51 bp, Homo sapiens
gcattattcttgctctctaagaacawgaagtcacgagagaaagtcagagga

SEQ ID NO: 1891 - DNA, 51 bp, Homo sapiens
gtttcacaaagggatacagattccayggtgataaagaaacactgggttgag

SEQ ID NO: 1892 - DNA, 51 bp, Homo sapiens
ctgacagaattcctgccatagatgartaaagcatttctgagaacccatgct

SEQ ID NO: 1893 - DNA, 51 bp, Homo sapiens
tatttgttaacattgggttacttacrgatgataacagcaagaattgtgttg

SEQ ID NO: 1894 - DNA, 51 bp, Homo sapiens
aaatgatacatgtacttattccataycactggacatcgaagttattcccag

SEQ ID NO: 1895 - DNA, 51 bp, Homo sapiens
agctctttaccctagggctattaacygtataacatggatattgagaggaaa

SEQ ID NO: 1896 - DNA, 51 bp, Homo sapiens
tctggacatttcctttgagggttgamtagaactattttgttttcctctgca

SEQ ID NO: 1897 - DNA, 51 bp, Homo sapiens
tttattcttctatggaaaccatagcwaaccgtctatttctgaagtatgaac

SEQ ID NO: 1898 - DNA, 51 bp, Homo sapiens
tcttcagcattccttgagtttctaawtatgatgatctcacctatcagtgtg

SEQ ID NO: 1899 - DNA, 51 bp, Homo sapiens
aaacaatattatttttctcatgataygtaactgaatactaatgttacttct

SEQ ID NO: 1900 - DNA, 51 bp, Homo sapiens
cagaaagctttagatgttctaccaastctatgctctcctcttctttctgga

SEQ ID NO: 1901 - DNA, 51 bp, Homo sapiens
tacagccttcagtctgtagccaaagrcccgcgagctcctggcacaccactg

SEQ ID NO: 1902 - DNA, 51 bp, Homo sapiens
atattggtgactcttaagctccttaygggttggaattgaaaccagaaatcc

SEQ ID NO: 1903 - DNA, 51 bp, Homo sapiens
atagtacattgccctgtaatttgctyaaataaataaatcttcatattacac

SEQ ID NO: 1904 - DNA, 51 bp, Homo sapiens
ttttatacttcatcaaggccgtatcyctgatataaccagaatatgatttat

SEQ ID NO: 1905 - DNA, 51 bp, Homo sapiens
tgtacctaaagcaaactgctaggtartaaggattacaacaattgctaagcc

SEQ ID NO: 1906 - DNA, 51 bp, Homo sapiens
gggcatgtgcctggatccatcgaacrgtgattgattggaagcaactgatgt

SEQ ID NO: 1907 - DNA, 51 bp, Homo sapiens
gagaatttcttatggcaatgttgaaygtcaaaggaaactgattgttatttt

SEQ ID NO: 1908 - DNA, 51 bp, Homo sapiens
aatggaatgtaatactaggttaaaayggaaattccaagatgatcgtctcat

SEQ ID NO: 1909 - DNA, 51 bp, Homo sapiens
ataccaaggagagttgacagataaartatatcctaagcaaaatctgcctaa

SEQ ID NO: 1910 - DNA, 51 bp, Homo sapiens
ggtctaagcccctggaacagaataargttaatgggctacatcttagccaaa

SEQ ID NO: 1911 - DNA, 51 bp, Homo sapiens
tactaaaattattgatgtagctaaaytgtgaggatttttggaggaaagagg

SEQ ID NO: 1912 - DNA, 51 bp, Homo sapiens
gggaactttgccacaagtttcttcaygctatggcaactactactgctccct

SEQ ID NO: 1913 - DNA, 51 bp, Homo sapiens
taaagagaatgccctaggcacaggakataatagtggtgaaccacagaccta

SEQ ID NO: 1914 - DNA, 51 bp, Homo sapiens
taaaaaacctaatgtattttttaacrgtgcatttattaccactgtactgct

SEQ ID NO: 1915 - DNA, 51 bp, Homo sapiens
gtataaataaactcataatccatgcraatcatcaaagtgctcattctatat

SEQ ID NO: 1916 - DNA, 51 bp, Homo sapiens
cccttgagaccaataacatcagcaaygggattagattataaatcaggttgt

SEQ ID NO: 1917 - DNA, 51 bp, Homo sapiens
cagtgtggcaggtggatggaagatascagtagccgccttccagaaatcttt

SEQ ID NO: 1918 - DNA, 51 bp, Homo sapiens
ctacattatcagataaatgtcaacayctgtaaatattgctcagaatcacct

SEQ ID NO: 1919 - DNA, 51 bp, Homo sapiens
aattcacttccttagtcatttcaccyagtactgtggttttaaatatcattt

SEQ ID NO: 1920 - DNA, 51 bp, Homo sapiens
tatcaaagcaggtgatgtttaggaartacccagtggccactgtaaaattct

SEQ ID NO: 1921 - DNA, 51 bp, Homo sapiens
tcaatcctagaccatgttaaatggarctcaaatattagtcctgctggtttc

SEQ ID NO: 1922 - DNA, 51 bp, Homo sapiens
ctttttctaggaaggaattaagcccraatggttgacttcatgcaactacat

SEQ ID NO: 1923 - DNA, 51 bp, Homo sapiens
ccagtgaagtggaaccagctcaggayggcctactgttatattgccaggcat

SEQ ID NO: 1924 - DNA, 51 bp, Homo sapiens
tcaatgactccttatatacttatcartagaaaaagcattaaaacatcagcc

SEQ ID NO: 1925 - DNA, 51 bp, Homo sapiens
ttgattcagttgtcttttcactactmcacagtgcatcttgggataaaaagg

SEQ ID NO: 1926 - DNA, 51 bp, Homo sapiens
agcactgttcctttaatgcttaccamtgagtcatatttttttacacactct

SEQ ID NO: 1927 - DNA, 51 bp, Homo sapiens
tgattcttcactatcttgttagctcrctggctctttaatgctttaaagatg

SEQ ID NO: 1928 - DNA, 51 bp, Homo sapiens
cgaggacaccctggtcaaacttgctyaataccttcatctctatgaactgtc

SEQ ID NO: 1929 - DNA, 51 bp, Homo sapiens
gggattcaaattcagacttttgacaytatcctaaatgaactgataactcta

SEQ ID NO: 1930 - DNA, 51 bp, Homo sapiens
gtggcattagggtctctcttgtctcyaatagctctggctggtatctgcaga

SEQ ID NO: 1931 - DNA, 51 bp, Homo sapiens
acaagagagaccctaatgccactgakgactaaaacctttcacttaagctcc

SEQ ID NO: 1932 - DNA, 51 bp, Homo sapiens
gcgggtcgggggacataaaatgaaarcgttgaacctagcaggagagggaga

SEQ ID NO: 1933 - DNA, 51 bp, Homo sapiens
aatcaaagccagcatgctctacccartcaagccctaggaaacatcagcagg

SEQ ID NO: 1934 - DNA, 51 bp, Homo sapiens
agccactattaaaagtgctagacgarcaaccacaaagtgcacttgcaccag

SEQ ID NO: 1935 - DNA, 51 bp, Homo sapiens
ctcctggattcgttgatttttcgacragttttcatttctctccttcagttc

SEQ ID NO: 1936 - DNA, 51 bp, Homo sapiens
aggttgtaggaagaatttttgaatcygatatctatggtatccttccaatct

SEQ ID NO: 1937 - DNA, 51 bp, Homo sapiens
caaagcattcttcacatataatcatratataaggttctccttcctgcccaa

SEQ ID NO: 1938 - DNA, 51 bp, Homo sapiens
atgtattttggaagtcaaatttttayataagcatttccaagtaattttact

SEQ ID NO: 1939 - DNA, 51 bp, Homo sapiens
attgggtccatttatatataaattgwaatatcttcttgtcatattaatact

SEQ ID NO: 1940 - DNA, 51 bp, Homo sapiens
ataataccatgatttgggtatcataraccagaaaagacttgagttctaatc

SEQ ID NO: 1941 - DNA, 51 bp, Homo sapiens
tttgggtatatacccaatcatgaaaytgctaggtcaaatcgtaattctgtt

SEQ ID NO: 1942 - DNA, 51 bp, Homo sapiens
gatgtgaatgtgtgctgatctgatasagaaaactttttaaagaagcttcag

SEQ ID NO: 1943 - DNA, 51 bp, Homo sapiens
atggggaggtatagaaataaaagtayagaagttttgtatgtgatcaaattt

SEQ ID NO: 1944 - DNA, 51 bp, Homo sapiens
aacagagctaagaaatgtatgtgtartaattcatgtatacaaatatctata

SEQ ID NO: 1945 - DNA, 51 bp, Homo sapiens
tcctctgtatattgaccacattatcraatatgaaagtttttaaggggaaga

SEQ ID NO: 1946 - DNA, 51 bp, Homo sapiens
gatatataatgtacagcatgagttawatgtagccttttgaagagtggatcc

SEQ ID NO: 1947 - DNA, 51 bp, Homo sapiens
tgattttgacacagccaggaagaaaytatgcttgaaacctctctgtattag

SEQ ID NO: 1948 - DNA, 51 bp, Homo sapiens
ccagagcaattccatatttttaagckgcaatttcacacatgtatagtaaag

SEQ ID NO: 1949 - DNA, 51 bp, Homo sapiens
gaataaggaaattattttcaccattkaaggagcttatatgtgcctatttta

SEQ ID NO: 1950 - DNA, 51 bp, Homo sapiens
cttattcagttcttggcatcattgamcctttgaaaagaaggtgatatggtt

SEQ ID NO: 1951 - DNA, 51 bp, Homo sapiens
aatggataaacactgtttgtgcctayatctttatctctttgcaatcacctc

SEQ ID NO: 1952 - DNA, 51 bp, Homo sapiens
taactctgggtttgtatgctaaagamaagaaatgtagctgtacttaggaca

SEQ ID NO: 1953 - DNA, 51 bp, Homo sapiens
tttgggaggtggcagtgatttcaaarttaatggtgcctgaggtacttgtga

SEQ ID NO: 1954 - DNA, 51 bp, Homo sapiens
aaacactggtatgtgcttgctattamctttttggagaccaatgcagaataa

SEQ ID NO: 1955 - DNA, 51 bp, Homo sapiens
ctcacagatactcatgactgagacartattttaaacaagtataaacaatca

SEQ ID NO: 1956 - DNA, 51 bp, Homo sapiens
cacagcatgattatgtgactagaacsattttggatatggtaatctgaactt

SEQ ID NO: 1957 - DNA, 51 bp, Homo sapiens
tcatcaatctgtattgttaatacacygcacatgtgtaagggcaagtccacc

SEQ ID NO: 1958 - DNA, 51 bp, Homo sapiens
ggcactattagagacaccacgtttayagcacggaagaaaaaagttcttgcc

SEQ ID NO: 1959 - DNA, 51 bp, Homo sapiens
ttcatgcactccaaagcagtaatgamagagtaaatgtatggaaatagggaa

SEQ ID NO: 1960 - DNA, 51 bp, Homo sapiens
gaagggaaatttctttagtgtctaayaatatctcgtggaatactagcattc

SEQ ID NO: 1961 - DNA, 51 bp, Homo sapiens
tgaaatgattttttaaaagcaatcaytcattattaaaatatggaattgaca

SEQ ID NO: 1962 - DNA, 51 bp, Homo sapiens
ccattattcatttctctactcattayctttgtcagttactcaattagcatg

SEQ ID NO: 1963 - DNA, 51 bp, Homo sapiens
agtattcttccacctggataatgtcycttagtctctaaagacctaacataa

SEQ ID NO: 1964 - DNA, 51 bp, Homo sapiens
atttgttcagtggtgcagtcatttcrcctataatgtgcaagtcaaatgtct

SEQ ID NO: 1965 - DNA, 51 bp, Homo sapiens
aaatcactatttctgtgcagtttaawtccaaaaattgtacaaattagactc

SEQ ID NO: 1966 - DNA, 51 bp, Homo sapiens
aaagacaaagacacatggagaataaytaatcatttagttttaaaaactcta

SEQ ID NO: 1967 - DNA, 51 bp, Homo sapiens
tcctgagagttttcttttgagggtawctgggaatattcaggagccaagatt

SEQ ID NO: 1968 - DNA, 51 bp, Homo sapiens
gagagttattttttcatatgtttacyaaaatacgtgtacaaaaatgctcat

SEQ ID NO: 1969 - DNA, 51 bp, Homo sapiens
ctcttctcattatttgttttgtaaaragaccctgagtttgttgggagtagt

SEQ ID NO: 1970 - DNA, 51 bp, Homo sapiens
cttctacaaatccagctagaaacaaraagatggaaattgggaggatgctgg

SEQ ID NO: 1971 - DNA, 51 bp, Homo sapiens
cggcccctctccatgttgggagagaygtagatgtccacgccaggcgtccca

SEQ ID NO: 1972 - DNA, 51 bp, Homo sapiens
tttctctctttcattcaaagtggcaragatcccctagtcaaccctcagcct

SEQ ID NO: 1973 - DNA, 51 bp, Homo sapiens
gtggcttacttaggttctctgaacasattcccggtgtcccctcacataccc

SEQ ID NO: 1974 - DNA, 51 bp, Homo sapiens
ttctatggtgactaataccgctgaaycaactcattcaaagatatttttaaa

SEQ ID NO: 1975 - DNA, 51 bp, Homo sapiens
aagcaggataaagcagccaaggtgaraaactcccagtgtgtgaggtacctc

SEQ ID NO: 1976 - DNA, 51 bp, Homo sapiens
agtcctattcttgagcccacttcacrgaaaaggaaactgaaactcatagaa

SEQ ID NO: 1977 - DNA, 51 bp, Homo sapiens
acttctgcagtgaattggatgaataygcacattaagtagaattagtaaaga

SEQ ID NO: 1978 - DNA, 51 bp, Homo sapiens
tggtactctcattatgcacccgtttwtacttggtgtcccacatgtctccaa

SEQ ID NO: 1979 - DNA, 51 bp, Homo sapiens
aattctagatgaaagggaaatgtacmctgaaatagtcttttgcgtggtgct

SEQ ID NO: 1980 - DNA, 51 bp, Homo sapiens
ccgatttcttctgtgttcaatgttaraaatacttttggaagactgatttta

SEQ ID NO: 1981 - DNA, 51 bp, Homo sapiens
cctcaggatttgatcaagggtaaaayaaaggcccatggtttaaatataaaa

SEQ ID NO: 1982 - DNA, 51 bp, Homo sapiens
actgtaaatgtcttttggtcaagagractaacaaatataaaggaacttgaa

SEQ ID NO: 1983 - DNA, 51 bp, Homo sapiens
agtcggtgtccctctcccatcgattscaacttttcccctccttccctctcc

SEQ ID NO: 1984 - DNA, 51 bp, Homo sapiens
gaggaatggcatgctctataggcacygtaaaaattctctttcctttaaaga

SEQ ID NO: 1985 - DNA, 51 bp, Homo sapiens
tcctcttattctaccattagagaaamtgtagcctgggaagaagtgatatgt

SEQ ID NO: 1986 - DNA, 51 bp, Homo sapiens
atctctttcagctctaaaagcctgamctacttaaaaaggctagcactggct

SEQ ID NO: 1987 - DNA, 51 bp, Homo sapiens
cagtttcaccaggcaacctccaacaytcagcagctcttggtgtatcaatgg

SEQ ID NO: 1988 - DNA, 51 bp, Homo sapiens
cagcctgccagctatcccttagcgasgttccagcttcatgcttacacaaca

SEQ ID NO: 1989 - DNA, 51 bp, Homo sapiens
tatatgtatatattgtatgtaaggcmaggtgttgcaaataaaagtacatat

SEQ ID NO: 1990 - DNA, 51 bp, Homo sapiens
aaaagttaatatgccatcactgggaycagaaactcttattgtgcttttcaa

SEQ ID NO: 1991 - DNA, 51 bp, Homo sapiens
tttttataaacttctcttctaaaacrgacttaactttgactcgcatccttc

SEQ ID NO: 1992 - DNA, 51 bp, Homo sapiens
tggtatgtaagttatgccagcctcartaaataaaaaagagagtctactctt

SEQ ID NO: 1993 - DNA, 51 bp, Homo sapiens
ttagctttttcaatagctctgtcacrctatgggttcgtatgaagtttgtgg

SEQ ID NO: 1994 - DNA, 51 bp, Homo sapiens
ccaatgcatcaaggttctacttaaasgatatcttctgcattttaacatttt

SEQ ID NO: 1995 - DNA, 51 bp, Homo sapiens
aagagggaaatttaaaattttcttcwaacaagtgataatgggcacacaaca

SEQ ID NO: 1996 - DNA, 51 bp, Homo sapiens
aataaagtcatattttccaacctcarctggatcctcagcgcccaacaattc

SEQ ID NO: 1997 - DNA, 51 bp, Homo sapiens
aattatctactctcttagaattatamctttagatctttgtcaagaagacct

SEQ ID NO: 1998 - DNA, 51 bp, Homo sapiens
accaccatcaatgaggatggcttccratgtcaatgccacccaatcatacca

SEQ ID NO: 1999 - DNA, 51 bp, Homo sapiens
tatctgacagggtggtccggaatggyggaagtaaatcgacaggtgaggaca

SEQ ID NO: 2000 - DNA, 51 bp, Homo sapiens
tgctcttcatctgatctgatcattakcataatccacctactgggaaacagg

SEQ ID NO: 2001 - DNA, 51 bp, Homo sapiens
ttgtcaagttttggtgtaatatcaakaaagaatacctgaaaaggctattaa

SEQ ID NO: 2002 - DNA, 51 bp, Homo sapiens
tggtgcttccctggcttgctgtgccrctctttcatagaacctaccacacag

SEQ ID NO: 2003 - DNA, 51 bp, Homo sapiens
atgtaacactagacttgtgggtttawgagatagtaaatctgtatacactgt

SEQ ID NO: 2004 - DNA, 51 bp, Homo sapiens
actggagggaccattaatttggcctsaagctttaacagtacagaaaatggg

SEQ ID NO: 2005 - DNA, 51 bp, Homo sapiens
acatctggaccgattacatccttcartctattgtatcatgatttatttaat

SEQ ID NO: 2006 - DNA, 51 bp, Homo sapiens
taaagaaaccagctgaattttacaaygaatcctgccctttaagtttgggag

SEQ ID NO: 2007 - DNA, 51 bp, Homo sapiens
cagcctagcacctgccaatatcccakcggtaaggaatgaacccagggcccc

SEQ ID NO: 2008 - DNA, 51 bp, Homo sapiens
gcgttgactttacaaaatcctttcaygccccacatcattgattaaagattt

SEQ ID NO: 2009 - DNA, 51 bp, Homo sapiens
aaagaaaaaaagacccttaagccaasaagactctccttcctttccttcttc

SEQ ID NO: 2010 - DNA, 51 bp, Homo sapiens
atatctttgctttttagtcctaaaamtcaataactgaactctcattgatgt

SEQ ID NO: 2011 - DNA, 51 bp, Homo sapiens
taaaaatgctagtttataattaggaygatcttggcttgaacaataatgttg

SEQ ID NO: 2012 - DNA, 51 bp, Homo sapiens
tgaatctgaaggttaatgagtccaaygagtccaagacgtttgtggaggaaa

SEQ ID NO: 2013 - DNA, 51 bp, Homo sapiens
tcctgctttatggtgaagacaaaggyatccacagtcatgtgcagccatttc

SEQ ID NO: 2014 - DNA, 51 bp, Homo sapiens
actggagaccctaaaattctgatcaytaatcttgatggagttcttaggtac

SEQ ID NO: 2015 - DNA, 51 bp, Homo sapiens
tattaaactgctcaaagaagtgagarataacaaaaacaaatgaaaaattgt

SEQ ID NO: 2016 - DNA, 51 bp, Homo sapiens
tttaggctagttgggaaagcataacmatctacaattatttgaagctataaa

SEQ ID NO: 2017 - DNA, 51 bp, Homo sapiens
ctacaattaattcttgttgttctacygagatggcaattgtttttgttgcag

SEQ ID NO: 2018 - DNA, 51 bp, Homo sapiens
tcataatatggaagaacaattgagayccaaaatatttactcaacagaaaga

SEQ ID NO: 2019 - DNA, 51 bp, Homo sapiens
tgggagagcatgttgcatcaaaaackgacacagtctaaacattttttaaaa

SEQ ID NO: 2020 - DNA, 51 bp, Homo sapiens
tcttgctttttatgaataaacatccrcaattggaaacctcattaacagatt

SEQ ID NO: 2021 - DNA, 51 bp, Homo sapiens
aaccttttagatctctaatcaaaaaktcagtaattcagaaatcctcttctc

SEQ ID NO: 2022 - DNA, 51 bp, Homo sapiens
gacttcctaagggaaagagccatcaragaagaagtaaaacaacaacagtaa

SEQ ID NO: 2023 - DNA, 51 bp, Homo sapiens
acattcctggggaaaattggcacttrtgaaagtggagctgtgagtttcttt

SEQ ID NO: 2024 - DNA, 51 bp, Homo sapiens
gtccgtttctctgttctaccatcaaytacatcattcgcaaacacttcaaca

SEQ ID NO: 2025 - DNA, 51 bp, Homo sapiens
ttaattgtagaaagcctagcctaagraaatgctcaagtttctcctttttgc

SEQ ID NO: 2026 - DNA, 51 bp, Homo sapiens
actgtgcccagtctctaatttcaacwagtgatactaacagcgtattggggg

SEQ ID NO: 2027 - DNA, 51 bp, Homo sapiens
cacccatccaaagttttacattggasgcaactaatcccagcagggatttat

SEQ ID NO: 2028 - DNA, 51 bp, Homo sapiens
aagaggataatccattacagtggtakaagtgctttgaaaaggggaaataaa

SEQ ID NO: 2029 - DNA, 51 bp, Homo sapiens
acaggttccttgtcatcaagctgagracattacttcatgattcttattaat

SEQ ID NO: 2030 - DNA, 51 bp, Homo sapiens
gctgtcttattccgcttgaaaatagscaaaaagtctactgtggtatttgta

SEQ ID NO: 2031 - DNA, 51 bp, Homo sapiens
gctgccttcccatctaatttattgtraagtcatatagtccatgtctgtgat

SEQ ID NO: 2032 - DNA, 51 bp, Homo sapiens
gaggaagaagatgtaggaacctcgaycttctctctcctgcagatttcatcc

SEQ ID NO: 2033 - DNA, 51 bp, Homo sapiens
gtccctaccctatattactacagtaygtacttttgtgtttctttgcttctt

SEQ ID NO: 2034 - DNA, 51 bp, Homo sapiens
catcacttttactccaagcatctcgrattccctgacaatgatagcctcgta

SEQ ID NO: 2035 - DNA, 51 bp, Homo sapiens
gggaagatataggtgatccatgcgartactgtctatttgcagaaaatatgg

SEQ ID NO: 2036 - DNA, 51 bp, Homo sapiens
ctggaagtaaaaaccttattaatagkagcataaattcaagggagaaaattt

SEQ ID NO: 2037 - DNA, 51 bp, Homo sapiens
agttagcataacgattacaagttacygattttcatatataagttccatcat

SEQ ID NO: 2038 - DNA, 51 bp, Homo sapiens
gctctcttctctctggtactctgctytttgtactctagctgacttgtcctc

SEQ ID NO: 2039 - DNA, 51 bp, Homo sapiens
aggcaacaaacccagttgtttctgawgtccaatatctcgacaaccattaat

SEQ ID NO: 2040 - DNA, 51 bp, Homo sapiens
tctggccattaaatgtcagtcttccsatatcctaatttgttggccacccac

SEQ ID NO: 2041 - DNA, 51 bp, Homo sapiens
ggaaacaatgtctccagaagggttaygatgtaaaaatatgtggcctttaac

SEQ ID NO: 2042 - DNA, 51 bp, Homo sapiens
gaggagcaaatgcaacaaccagttcmactacattgaaggagggcactaagt

SEQ ID NO: 2043 - DNA, 51 bp, Homo sapiens
ctggtgcatccctggtgatccaaggwaagtgttttactgcttcatataggg

SEQ ID NO: 2044 - DNA, 51 bp, Homo sapiens
tttaggatccatattagatgatgacraaattgtagataccttaagaaaatc

SEQ ID NO: 2045 - DNA, 51 bp, Homo sapiens
acagaaaataaactaggctatgttckcaaggaattcactgaataaactgac

SEQ ID NO: 2046 - DNA, 51 bp, Homo sapiens
gtattctagatattaaagtagaaaakaatttcagcatcatatttcatatat

SEQ ID NO: 2047 - DNA, 51 bp, Homo sapiens
cccatttttttttctcgacaaacccragttatctctgtagttcctaatcct

SEQ ID NO: 2048 - DNA, 51 bp, Homo sapiens
gaatctttaaaattactttgggacckgaaactgtctgaagtattactttag

SEQ ID NO: 2049 - DNA, 51 bp, Homo sapiens
aagagaaaaagataagattactcaaygatagagatgaattaaggtaaattt

SEQ ID NO: 2050 - DNA, 51 bp, Homo sapiens
gaaagtgtgaggacagcacagtaaayagaaggaaaattcccttagcagtcc

SEQ ID NO: 2051 - DNA, 51 bp, Homo sapiens
aacctcagcctgttttagcctttcarcattcgagaaagatgtttttccaag

SEQ ID NO: 2052 - DNA, 51 bp, Homo sapiens
atttttcatttgctattgatttatayactattctggtgaagttaccttttc

SEQ ID NO: 2053 - DNA, 51 bp, Homo sapiens
taaaatttgatggttagcaagaataygtatgggtagaggacacttacttaa

SEQ ID NO: 2054 - DNA, 51 bp, Homo sapiens
ttaactcatattcaagcaagtaatcmgatcgtctactggatctaacattcc

SEQ ID NO: 2055 - DNA, 51 bp, Homo sapiens
cacatagattttaagtcttggttagraggccattccctactctgagattac

SEQ ID NO: 2056 - DNA, 51 bp, Homo sapiens
accatcctgcccttggaaagaacaasactttacaggagctgcctcatttta

SEQ ID NO: 2057 - DNA, 51 bp, Homo sapiens
ataaagaaactgtggtatatatgtaygaagaaatactactaaagctataaa

SEQ ID NO: 2058 - DNA, 51 bp, Homo sapiens
tttacggctgaaatggtgcagtaaargagtaaagcaaaaaggagaaagaga

SEQ ID NO: 2059 - DNA, 51 bp, Homo sapiens
tcacagccttcagtgataaccttggycatataggagagtatactcaagagt

SEQ ID NO: 2060 - DNA, 51 bp, Homo sapiens
tcctggagtcagacctagattgaccygttagctctcccacttactagttgc

SEQ ID NO: 2061 - DNA, 51 bp, Homo sapiens
ctcttctattttctgaacctagtagracatgatggagctgaagagattccc

SEQ ID NO: 2062 - DNA, 51 bp, Homo sapiens
gagtttgatcttttaatcgaatggcyatttaaataaaattttaaaaagcaa

SEQ ID NO: 2063 - DNA, 51 bp, Homo sapiens
ctgaccacacagactaatgccccagwacggttcttgcaccaattgcgaagt

SEQ ID NO: 2064 - DNA, 51 bp, Homo sapiens
atttagagtaagatagagagtctccrcaaaataatattcatgaaatactgt

SEQ ID NO: 2065 - DNA, 51 bp, Homo sapiens
tcaccagtgaacatcaaattagtcayagcaatgtaaccgtaatttttcaaa

SEQ ID NO: 2066 - DNA, 51 bp, Homo sapiens
taaataataaacatggtaaatcgtayaatatatgcatagttctttctagtt

SEQ ID NO: 2067 - DNA, 51 bp, Homo sapiens
aaaatttgaagcttatcagcacaagycatgccttagggtctaaatctaaaa

SEQ ID NO: 2068 - DNA, 51 bp, Homo sapiens
atgattacttttcctcctgaccacakcttttggttccaaaatgtattacac

SEQ ID NO: 2069 - DNA, 51 bp, Homo sapiens
taatatattaatatagtgctattgaygttattgattgacatattctttttg

SEQ ID NO: 2070 - DNA, 51 bp, Homo sapiens
ggttagtctctcagaggctaagtaaygatcaaccaacaaaacctgcaaaac

SEQ ID NO: 2071 - DNA, 51 bp, Homo sapiens
atttatttagaagaaaattcagaacmgttcatttcttcatcatccttgtct

SEQ ID NO: 2072 - DNA, 51 bp, Homo sapiens
cattaattctctagcattccatctckaaaacaccctggacttccttgactg

SEQ ID NO: 2073 - DNA, 51 bp, Homo sapiens
tgttgatcattttttttgctgtgaawacttaattttaaatctgcaaatgat

SEQ ID NO: 2074 - DNA, 51 bp, Homo sapiens
gaacataaaatcctaagctgaggagractgtaagagattgcctggtctggc

SEQ ID NO: 2075 - DNA, 51 bp, Homo sapiens
taaatctaacaaaaactgtgtaagarataaatgtttaaaatcctaaaatga

SEQ ID NO: 2076 - DNA, 51 bp, Homo sapiens
cttctgttttcatccagtgccactcraaaggaataatggtgatgctgtccc

SEQ ID NO: 2077 - DNA, 51 bp, Homo sapiens
aagatatgttaatgcttggaatgaarttatcacaagatacttgttttgcca

SEQ ID NO: 2078 - DNA, 51 bp, Homo sapiens
cccaatggaaaccctagaacacagayggtcactagaagagttccacattgg

SEQ ID NO: 2079 - DNA, 51 bp, Homo sapiens
gagcctgagacataatagaacattayataacagttgctgatgatcgcttga

SEQ ID NO: 2080 - DNA, 51 bp, Homo sapiens
aagggtacagaaatagatatttgaamattataaccacaaagatggtcacat

SEQ ID NO: 2081 - DNA, 51 bp, Homo sapiens
aatatttaacggtgagaatccaacaktagacatcaaggcgctttgggtatt

SEQ ID NO: 2082 - DNA, 51 bp, Homo sapiens
atgaaaatgtgtgaattgatgaaaayagctctaatgattatgtaagaatac

SEQ ID NO: 2083 - DNA, 51 bp, Homo sapiens
aaaatacaaaacataaactttatttstcagcacataattcatcaaggtcaa

SEQ ID NO: 2084 - DNA, 51 bp, Homo sapiens
gcaaatttcacaacacattcaatgasaggcatatatacaatgatacttaca

SEQ ID NO: 2085 - DNA, 51 bp, Homo sapiens
tttcaaatgtttgggtatttttaackgaagacacgaatacgaaatacttga

SEQ ID NO: 2086 - DNA, 51 bp, Homo sapiens
catttgatctattaaatgtctctgartaccatttatgatggaatggagcac

SEQ ID NO: 2087 - DNA, 51 bp, Homo sapiens
aaaccactcactagagagatgagaartagtgttaattaagttcatctccca

SEQ ID NO: 2088 - DNA, 51 bp, Homo sapiens
tccctttgttattcttaagtccagasgaatcaatcaaaacaactgcttgtt

SEQ ID NO: 2089 - DNA, 51 bp, Homo sapiens
tccagccacttctaccagaagtcacygagctttagccacctcctccctgca

SEQ ID NO: 2090 - DNA, 51 bp, Homo sapiens
tggagccaggaggcagcatgctgtasgatcacagaattagtgaggcacaca

SEQ ID NO: 2091 - DNA, 51 bp, Homo sapiens
atagaccaaggacaagcggcattgayaccacccgacagcttgttagcaatg

SEQ ID NO: 2092 - DNA, 51 bp, Homo sapiens
gtgcaacagaggtgctgaatgaagamctatcgatgattgattgatacgtta

SEQ ID NO: 2093 - DNA, 51 bp, Homo sapiens
aattttggtataatgctgatggcagkaaaaaggcatggactcactgtatat

SEQ ID NO: 2094 - DNA, 51 bp, Homo sapiens
gccaaagggctactaagataaaagcragtttcaagtaacttaaattgctgt

SEQ ID NO: 2095 - DNA, 51 bp, Homo sapiens
tggcaattgggtttgggagaggcgamcagaccattccagatgttatttcac

SEQ ID NO: 2096 - DNA, 51 bp, Homo sapiens
ttaaattttgttcattaaatcttggyatgttagagtaataactagctattc

SEQ ID NO: 2097 - DNA, 51 bp, Homo sapiens
aaaaagaaaggaatcaagcatacaasgatagaaaactcttaagttttatct

SEQ ID NO: 2098 - DNA, 51 bp, Homo sapiens
gactttatgcctcatctatctataawgcatacatttgaagttaatccattg

SEQ ID NO: 2099 - DNA, 51 bp, Homo sapiens
tgcaattacaaattaaatctcatcamtatggaaatgttgcagcatttttac

SEQ ID NO: 2100 - DNA, 51 bp, Homo sapiens
tacattcttcgcagatgttttattamagggatgtatggaaatcgattgttt

SEQ ID NO: 2101 - DNA, 51 bp, Homo sapiens
tagttgggagtttttcaactgcaaaygaaatgactctgaaaaagtgataaa

SEQ ID NO: 2102 - DNA, 51 bp, Homo sapiens
gtaaatagcatttagtgtttatatasaaaaatgcctctatttttcatctgc

SEQ ID NO: 2103 - DNA, 51 bp, Homo sapiens
gcattagattgctgctagataaaacrctactttaacttagttggaatctga

SEQ ID NO: 2104 - DNA, 51 bp, Homo sapiens
gggctgaagaaggctacctcaggtawagagaccgtccatgtcctgggtcac

SEQ ID NO: 2105 - DNA, 51 bp, Homo sapiens
gtgaggcttccctttggggctgtgawtacaacttatctggcttctaaagat

SEQ ID NO: 2106 - DNA, 51 bp, Homo sapiens
actgcttaacttaagcaaaatcagawcaaattaaggctgaaatctctttct

SEQ ID NO: 2107 - DNA, 51 bp, Homo sapiens
cttggccaacagaggttcaaacacamcatgaaatatgtgagcaccagaatg

SEQ ID NO: 2108 - DNA, 51 bp, Homo sapiens
gtaggcctgtacgactctattctcayagtgtggaagtctcagaccttctgt

SEQ ID NO: 2109 - DNA, 51 bp, Homo sapiens
aagagagaacagtaagatgggaaccmattgaaaataaagacaaatagtaga

SEQ ID NO: 2110 - DNA, 51 bp, Homo sapiens
taacagtgaggggatccggctagagyaacccaagtacagtcgattcattac

SEQ ID NO: 2111 - DNA, 51 bp, Homo sapiens
atttgggaatcaatataacaaaataygtgcattacctctacaaggaaaact

SEQ ID NO: 2112 - DNA, 51 bp, Homo sapiens
tccatatagacttttaaagcattacraaactcttcatgtgttattatgctt

SEQ ID NO: 2113 - DNA, 51 bp, Homo sapiens
tactatttgtggtatcaattcattcwcattgggtttactaaattattattt

SEQ ID NO: 2114 - DNA, 51 bp, Homo sapiens
ttatttacaacttaactgaagccacragatttaatcgccttcctggaagct

SEQ ID NO: 2115 - DNA, 51 bp, Homo sapiens
ttttccactcactgcattaacataaytcaagagaagttgccagaacggaca

SEQ ID NO: 2116 - DNA, 51 bp, Homo sapiens
tgatttgaatattatcagtttccaayatttttaggaatgtatattacctat

SEQ ID NO: 2117 - DNA, 51 bp, Homo sapiens
tgctatggattctatcttatttttawccagctaaggtaatggaaagatgtg

SEQ ID NO: 2118 - DNA, 51 bp, Homo sapiens
ataaaactttttggatgtatttatayggcaccctctcatgccatccaaaac

SEQ ID NO: 2119 - DNA, 51 bp, Homo sapiens
atcacagttctcaaactacactacakcagtttttcaaattacataaagtag

SEQ ID NO: 2120 - DNA, 51 bp, Homo sapiens
tattaagtgtgcgattgcattattasgaatcctcccatctcctctctcctg

SEQ ID NO: 2121 - DNA, 51 bp, Homo sapiens
cttaagaatgatgaaaggtattatayattttagaaatttaacccaggtcta

SEQ ID NO: 2122 - DNA, 51 bp, Homo sapiens
gtgtcagtaattaaatttatatcacrgactaaacagagtttctttttgttt

SEQ ID NO: 2123 - DNA, 51 bp, Homo sapiens
aatccttgatgatgaatgatcacgarctatacattctgtaagcaatcttaa

SEQ ID NO: 2124 - DNA, 51 bp, Homo sapiens
ctctgtttcttgttgccattattcawcctgggaggcatccggctgcacctc

SEQ ID NO: 2125 - DNA, 51 bp, Homo sapiens
gaggtgcagccctgccagaatctcamgagtagaaagagtaaggcctattct

SEQ ID NO: 2126 - DNA, 51 bp, Homo sapiens
ctcagtcatctgtccaaagggagtayctcacacagtgccactgacaagaac

SEQ ID NO: 2127 - DNA, 51 bp, Homo sapiens
tcccaactgtcttctacaatgaaatrtctatgcaaatcagccccagaccct

SEQ ID NO: 2128 - DNA, 51 bp, Homo sapiens
actacgatcatgtcattcaatgaaasttagctcactgatggaaagtacagg

SEQ ID NO: 2129 - DNA, 51 bp, Homo sapiens
agaggtgtgaaaaattgtcaaaagtyactgttgggtgctgtgggtagaagt

SEQ ID NO: 2130 - DNA, 51 bp, Homo sapiens
ttcctttcagactttttgtctgtccrataatgtaattcatgtaattgggat

SEQ ID NO: 2131 - DNA, 51 bp, Homo sapiens
agaaaaatacagtaactccttagcasggtgttaagaagcatgaaggatgag

SEQ ID NO: 2132 - DNA, 51 bp, Homo sapiens
tcctctcctagggtcatcaaggacckatatgatttgtgcccatttgtatct

SEQ ID NO: 2133 - DNA, 51 bp, Homo sapiens
tgatagtaaatccttcactgctttckattgaaggttctattctgtagtgat

SEQ ID NO: 2134 - DNA, 51 bp, Homo sapiens
ggaagtttccttaaaattggacacaratacatatatacacgtgtgcatgtg

SEQ ID NO: 2135 - DNA, 51 bp, Homo sapiens
ttggctgttgtttgttttagtaggartaatttgcaacatgtttttgtatca

SEQ ID NO: 2136 - DNA, 51 bp, Homo sapiens
atttgccaattgagaaagaattttaraacattgtactcagtaacaatatga

SEQ ID NO: 2137 - DNA, 51 bp, Homo sapiens
atattccctggaaactgaaaaattawgtatgttaaatagtgttttaattgc

SEQ ID NO: 2138 - DNA, 51 bp, Homo sapiens
gtaatagtggcaatttatggagcaartgacacgctgtaactttgttatata

SEQ ID NO: 2139 - DNA, 51 bp, Homo sapiens
tctctccatattataagaacacttgwatattgctactggaacatagtcctt

SEQ ID NO: 2140 - DNA, 51 bp, Homo sapiens
ttctcaattcactaagtttgtattarcatcctaaaatgcatctctccccca

SEQ ID NO: 2141 - DNA, 51 bp, Homo sapiens
ctgaacagtgaacaaacataaggacraaaccaaagaaaaagtatttgaagc

SEQ ID NO: 2142 - DNA, 51 bp, Homo sapiens
aggaatctgattatactgcaggtcarattatatcctaaagatatatttgta

SEQ ID NO: 2143 - DNA, 51 bp, Homo sapiens
aggttaggtgacatacaagaacatgyggttccacagcagtcctgtcattct

SEQ ID NO: 2144 - DNA, 51 bp, Homo sapiens
cttctgcattcatacacgtaaatctyaatctggaaggaagatagaatctac

SEQ ID NO: 2145 - DNA, 51 bp, Homo sapiens
tatgctgcatcaatgcattcctctgmaatgaaggtactctgcgttccactg

SEQ ID NO: 2146 - DNA, 51 bp, Homo sapiens
atctcctgatcccttatagtcttcamgtccttgcagtaatgtctacattcg

SEQ ID NO: 2147 - DNA, 51 bp, Homo sapiens
tgctcacattataatgtaacaccttmaagaagactaagagcatcaccaagt

SEQ ID NO: 2148 - DNA, 51 bp, Homo sapiens
caagagtatctatgctcaaaacatayctgaaagtttaaaatgactattgag

SEQ ID NO: 2149 - DNA, 51 bp, Homo sapiens
agttaccataattaagcttattatcrcatctatcacctcatacaattgcca

SEQ ID NO: 2150 - DNA, 51 bp, Homo sapiens
agataagcacacaaatgagattgggyaatgctatcaagggaggagaaagac

SEQ ID NO: 2151 - DNA, 51 bp, Homo sapiens
cgcttttctaaagcagaaatcactamgcatctcagatacctcaagttgcat

SEQ ID NO: 2152 - DNA, 51 bp, Homo sapiens
tagccacagctaaactactgtgccawtgtattaaccagtatctaattacat

SEQ ID NO: 2153 - DNA, 51 bp, Homo sapiens
ctttacccatcctagcagcacatacmaggttagtatcctcaaataacggat

SEQ ID NO: 2154 - DNA, 51 bp, Homo sapiens
tgagatagttaaacaacttatatagrcgtaaattttcttcccgttttttaa

SEQ ID NO: 2155 - DNA, 51 bp, Homo sapiens
gagatgatactgttgtctttgaaaaygtagtaaggggccataagccaatga

SEQ ID NO: 2156 - DNA, 51 bp, Homo sapiens
aaaggacaatcgaagcaactcttgaracattctaaggttaaaaatattcag

SEQ ID NO: 2157 - DNA, 51 bp, Homo sapiens
tttcctttgtattataaagattccartatgatttatgttatttgtaacaat

SEQ ID NO: 2158 - DNA, 51 bp, Homo sapiens
gcttctaccaaaactaccattggagkacttacagaataccttatccatcat

SEQ ID NO: 2159 - DNA, 51 bp, Homo sapiens
atggtgcttcctgtaaaaatgttgayggtaaaatagctgttagcagttaca

SEQ ID NO: 2160 - DNA, 51 bp, Homo sapiens
catagcaataactttagtcagctagyaggattccttcaatagttttaccca

SEQ ID NO: 2161 - DNA, 51 bp, Homo sapiens
tgtttgattttccttatgtgccagamggatttaaaaaaaaaaacccaaaag

SEQ ID NO: 2162 - DNA, 51 bp, Homo sapiens
tgtttctttatggttgtattaaataygtgcttacattcttcacaacatatt

SEQ ID NO: 2163 - DNA, 51 bp, Homo sapiens
gttcattttgtgtgtaaacactctcmatttcccagatttaaagtgtggact

SEQ ID NO: 2164 - DNA, 51 bp, Homo sapiens
tgaattgtatcattgccaagcatackgagaagacttcagggatatttgtga

SEQ ID NO: 2165 - DNA, 51 bp, Homo sapiens
gggcactccagaatgtttggtgatayggcttgtcaagagtcacatagctgg

SEQ ID NO: 2166 - DNA, 51 bp, Homo sapiens
caaaagccacgtttgaaatgtaaacraggaatatgtgtagaaagtgctccc

SEQ ID NO: 2167 - DNA, 51 bp, Homo sapiens
ctgtgtttgctgtttcataattagcrcctagaacatggctatgcctaacgt

SEQ ID NO: 2168 - DNA, 51 bp, Homo sapiens
acccaaacactgtgtggccagaaacmattaacacactctagcccagaatac

SEQ ID NO: 2169 - DNA, 51 bp, Homo sapiens
gcaagtattaaccgcgacatggtaaygacaaacacagaggatcgtgcagga

SEQ ID NO: 2170 - DNA, 51 bp, Homo sapiens
aagtattcttagatgtccttttaaartctgatctgcaaaaagtactttagg

SEQ ID NO: 2171 - DNA, 51 bp, Homo sapiens
agccaccaggccaatccatttacacraagtagagagagcgtattctggtta

SEQ ID NO: 2172 - DNA, 51 bp, Homo sapiens
aggccaattcagtcatcaattacaawgtttacaaatggcatttggttttta

SEQ ID NO: 2173 - DNA, 51 bp, Homo sapiens
aagaaaaaaaacctccaggacaatayagcatttcagtgtacattttttaaa

SEQ ID NO: 2174 - DNA, 51 bp, Homo sapiens
tatatgagacccctaatgtcatagaytaaaactgaatgagagttttcttaa

SEQ ID NO: 2175 - DNA, 51 bp, Homo sapiens
tcatcattataatggaaatttgacaygaggacagcattagaggagggagtg

SEQ ID NO: 2176 - DNA, 51 bp, Homo sapiens
tgttttggaactctgtttagacatawgttagcctgtcttactctaatatca

SEQ ID NO: 2177 - DNA, 51 bp, Homo sapiens
attaagaaaataattacagaagtaasaaagacgactcaatcagtgtagcta

SEQ ID NO: 2178 - DNA, 51 bp, Homo sapiens
catttaacctttgtgtggtgctaacmattagtgatcctataactaacaaaa

SEQ ID NO: 2179 - DNA, 51 bp, Homo sapiens
acagagcaaacaagcaaaaggaatcmgaaagaagtctgaacatactttaga

SEQ ID NO: 2180 - DNA, 51 bp, Homo sapiens
gtctggaatacgaggcatttcagatmataagggtcatacttctacttttat

SEQ ID NO: 2181 - DNA, 51 bp, Homo sapiens
ggtctttccccaaagcatctctctaygtcaataatagaccctatccttgga

SEQ ID NO: 2182 - DNA, 51 bp, Homo sapiens
agtacttctaattattagccgtacayaactctccttgatcatactcaattt

SEQ ID NO: 2183 - DNA, 51 bp, Homo sapiens
caataaatattgattaatggagttaygaattagatgaatgataatggattt

SEQ ID NO: 2184 - DNA, 51 bp, Homo sapiens
tttatttatcagcaaattgtagttayagttatttttaatactttggtcttt

SEQ ID NO: 2185 - DNA, 51 bp, Homo sapiens
ttatagcctttttaattggcagaaartatcattaggactgttattctaaaa

SEQ ID NO: 2186 - DNA, 51 bp, Homo sapiens
tttgggctaaaaatcatggtcatagraagaactgtatgttggtcaaatgta

SEQ ID NO: 2187 - DNA, 51 bp, Homo sapiens
gtcttgaagctaatgggataagatargtcctagaggttccttctgcttgga

SEQ ID NO: 2188 - DNA, 51 bp, Homo sapiens
taggatagatatctgaagtatcacaytgaaagtatagaggaaagcatatag

SEQ ID NO: 2189 - DNA, 51 bp, Homo sapiens
ttagtgaatgcagaatgaagagaaarttggtggaaaatagataagaaagta

SEQ ID NO: 2190 - DNA, 51 bp, Homo sapiens
acatctttccccttaaggcaatacawatgattgtgctaaaaaaattataca

SEQ ID NO: 2191 - DNA, 51 bp, Homo sapiens
agatatttctcagaagtagttgatgycataaagcagacaccttccaccagg

SEQ ID NO: 2192 - DNA, 51 bp, Homo sapiens
aatacctacgatcttgaaaacagacrgctttgggcgaatgccttcttgagt

SEQ ID NO: 2193 - DNA, 51 bp, Homo sapiens
tatataaaagggggcatattatgaarcaaatccagacttaaccatttcagg

SEQ ID NO: 2194 - DNA, 51 bp, Homo sapiens
atcccaagttctttgagtggagccayattgagtccttctgggtggattttt

SEQ ID NO: 2195 - DNA, 51 bp, Homo sapiens
gaagtagaaggggtttgtgtatgacycaacatgtgtctctatgcatgcatg

SEQ ID NO: 2196 - DNA, 51 bp, Homo sapiens
caattcaattattatgtcaattccaygaaaaaaatatgctactgatgtcat

SEQ ID NO: 2197 - DNA, 51 bp, Homo sapiens
tgtagggtcatttctggctcatccaractttttattcttttttcagatttt

SEQ ID NO: 2198 - DNA, 51 bp, Homo sapiens
aaatcccttgtgcacttctgaataarctcaatatttttggagactctctgt

SEQ ID NO: 2199 - DNA, 51 bp, Homo sapiens
tttctgtgctggtggtcttttctcargccaatcctccctcttttaggtaag

SEQ ID NO: 2200 - DNA, 51 bp, Homo sapiens
taaatgtgaactccaccttttgtggmaggaaggactattcaagataacaaa

SEQ ID NO: 2201 - DNA, 51 bp, Homo sapiens
tttcgttggtacatttggatgcatcrgaaaattatctttcattgctctcta

SEQ ID NO: 2202 - DNA, 51 bp, Homo sapiens
atccctaacaactcaaaactccaatrattatggccaaatccgattggagaa

SEQ ID NO: 2203 - DNA, 51 bp, Homo sapiens
ttgaggatatggggatgaaggcctaygatggcttggttattcagaatgcgt

SEQ ID NO: 2204 - DNA, 51 bp, Homo sapiens
agagagctggatctatcacttaccarccatagcgtcacacttgtattttgc

SEQ ID NO: 2205 - DNA, 51 bp, Homo sapiens
gttttattttatttccacactaccasaaatttagctacaccttttaaaata

SEQ ID NO: 2206 - DNA, 51 bp, Homo sapiens
agggtgtcaatttgtgagaagaaatyaaaggaccaatggtctagacgtctc

SEQ ID NO: 2207 - DNA, 51 bp, Homo sapiens
aattttagacacattacctcatttgkctataaagttgtacagtagaaaaag

SEQ ID NO: 2208 - DNA, 51 bp, Homo sapiens
acagtagaaaaagcattccattttayaatcagacagttcagattgagagag

SEQ ID NO: 2209 - DNA, 51 bp, Homo sapiens
ggtattaatatatttgctacgtttgracatcccaactcaaagattgataat

SEQ ID NO: 2210 - DNA, 51 bp, Homo sapiens
tttagtgctcctctatcaaattttaygcttttctttcaactaggtcttgca

SEQ ID NO: 2211 - DNA, 51 bp, Homo sapiens
ttttataacactttaccatttacaargaaatttcatatactgtattctatt

SEQ ID NO: 2212 - DNA, 51 bp, Homo sapiens
acattaaaaattgactgacctaggaygctaaaagaagtttgtggcagaatt

SEQ ID NO: 2213 - DNA, 51 bp, Homo sapiens
tgggaagatctctctagctataagaytcaagcacctttggagggattggtt

SEQ ID NO: 2214 - DNA, 51 bp, Homo sapiens
gggtcctctctgacccatgagcaackaattgtatcccggctctgagtgaca

SEQ ID NO: 2215 - DNA, 51 bp, Homo sapiens
tgttattaagtgctgtgacacagcayaattaatgtaaagaccttacaagat

SEQ ID NO: 2216 - DNA, 51 bp, Homo sapiens
aggttttcccaaaagctcctggaaakatgtggaataatgaggcctgcatgt

SEQ ID NO: 2217 - DNA, 51 bp, Homo sapiens
aacctctctaatttgatgatcactcraacccagattctggtgcttaccctg

SEQ ID NO: 2218 - DNA, 51 bp, Homo sapiens
taagaatcttataacttccctcctcratcaataaagttctgctcctgtcaa

SEQ ID NO: 2219 - DNA, 51 bp, Homo sapiens
cctgaatcccagctccagttccaaasgttgcttactaaacttcatcctcag

SEQ ID NO: 2220 - DNA, 51 bp, Homo sapiens
aaaaaaataaaaattataaagtttayactgagacaagtaaatttttagtgc

SEQ ID NO: 2221 - DNA, 51 bp, Homo sapiens
aaaacaaactagaatatatgagcaamtgaatccaagtatatacaatatatc

SEQ ID NO: 2222 - DNA, 51 bp, Homo sapiens
ttcagtatcatccatattgttcctayattagcagttaatgtatcttaacta

SEQ ID NO: 2223 - DNA, 51 bp, Homo sapiens
taaaattaattacacctgtatctttyttgctttgtagacaatttcaaatta

SEQ ID NO: 2224 - DNA, 51 bp, Homo sapiens
ggctgtctctggaacttgatctcaamgtatttttcatattgatttgtcatt

SEQ ID NO: 2225 - DNA, 51 bp, Homo sapiens
ctctactcagtgagttactgttgtcrcactttccattaacttataaatata

SEQ ID NO: 2226 - DNA, 51 bp, Homo sapiens
actttaattcagagagaagtcttcastcattttaactctccttaacaagtt

SEQ ID NO: 2227 - DNA, 51 bp, Homo sapiens
aaaaagcatggtgcttgttgtcaacrgacttggatttaagttctgaatctg

SEQ ID NO: 2228 - DNA, 51 bp, Homo sapiens
gaataaaatacatgaatatagtagamaagcggaggaatggttctggcctag

SEQ ID NO: 2229 - DNA, 51 bp, Homo sapiens
caaaatactcttaataatcccttaamtaggcaataaagtacatggctgagt

SEQ ID NO: 2230 - DNA, 51 bp, Homo sapiens
actattgtaaggagatgctcttaaayaattttgtcttgtcaattctgtttt

SEQ ID NO: 2231 - DNA, 51 bp, Homo sapiens
tgtactaaacaacaacaacctacgarctttattatttttcttcccagcaac

SEQ ID NO: 2232 - DNA, 51 bp, Homo sapiens
aacaatttaaaaattccacctgatcrcctaacttttccttcagtcaaggat

SEQ ID NO: 2233 - DNA, 51 bp, Homo sapiens
taagaacaaacacccaagatttttcracagctgtaatgctttgtgttaaca

SEQ ID NO: 2234 - DNA, 51 bp, Homo sapiens
ccctgtgacatttttaaggttggacycataggatgatacttacctagggaa

SEQ ID NO: 2235 - DNA, 51 bp, Homo sapiens
ccccaagagaaggaggataacaccawgtcggcatctcagccactgatgcag

SEQ ID NO: 2236 - DNA, 51 bp, Homo sapiens
atctcagcaaatttagtcagattagsaaaaacctccctcaaaactcctaga

SEQ ID NO: 2237 - DNA, 51 bp, Homo sapiens
ccatattttcttccatttttttaatyagagaggagtatttgtctgtagtcc

SEQ ID NO: 2238 - DNA, 51 bp, Homo sapiens
gtacttgtatttttaagatccacagraaagtctaacatgagtcttgggcca

SEQ ID NO: 2239 - DNA, 51 bp, Homo sapiens
tagcgtgacagtcagaaaccgaccaycggagtgatattctcttatgtaaac

SEQ ID NO: 2240 - DNA, 51 bp, Homo sapiens
agcctggctcttgatcttaacctcarttctgcttcttattaactgtgtgat

SEQ ID NO: 2241 - DNA, 51 bp, Homo sapiens
taaatacatctgacttttgaagttayatgaataggcaaaccctatttacag

SEQ ID NO: 2242 - DNA, 51 bp, Homo sapiens
ggtatttttctaatgggtgataatartaacagcagctaatgtgtattgaac

SEQ ID NO: 2243 - DNA, 51 bp, Homo sapiens
gtgctggtccaggttttccaagaaayagatgttgagatgggattttatcag

SEQ ID NO: 2244 - DNA, 51 bp, Homo sapiens
agataagaatgagaattttgacagtycatatgtggtgaaaaaatttgttca

SEQ ID NO: 2245 - DNA, 51 bp, Homo sapiens
gctgaacttgccatgggatctcctcraacatactttgcttttcctgttttc

SEQ ID NO: 2246 - DNA, 51 bp, Homo sapiens
ctagagtccaagcagctaccatgtcraccatgtttggagtaaaggtgtgtt

SEQ ID NO: 2247 - DNA, 51 bp, Homo sapiens
cataagaaaaacttgacaataagtcrcaacttttgttctccctctcagtat

SEQ ID NO: 2248 - DNA, 51 bp, Homo sapiens
agggaagtcagtgcctgacttgtcartacaatgcagcaggtccattctcat

SEQ ID NO: 2249 - DNA, 51 bp, Homo sapiens
gcacagcccctaaaacatcgaattawccagctgaaagatttgggtagtatt

SEQ ID NO: 2250 - DNA, 51 bp, Homo sapiens
cacttcagtctgagaaatagagtgaraatcatctgtttaataaaaaataaa

SEQ ID NO: 2251 - DNA, 51 bp, Homo sapiens
tcaaaatgatctaaacagagactaamtgaaatatattaatatatataaata

SEQ ID NO: 2252 - DNA, 51 bp, Homo sapiens
gaaaactcaaacaaagaataaatatwactctgtgttttttacagttaaaaa

SEQ ID NO: 2253 - DNA, 51 bp, Homo sapiens
tagctacactgataagtctggcatgyaatatttatcaggtaaaagttagct

SEQ ID NO: 2254 - DNA, 51 bp, Homo sapiens
cccacatgcaaatgctttattaggakgaagagtacagtcacagagcaacaa

SEQ ID NO: 2255 - DNA, 51 bp, Homo sapiens
aaaaaaattgaaatcatatcaagtcyctgtttaatcaaccacaatggtatg

SEQ ID NO: 2256 - DNA, 51 bp, Homo sapiens
actttaaatatgtgcttattgtttasagagagatagatgagaagactttgg

SEQ ID NO: 2257 - DNA, 51 bp, Homo sapiens
tttaactcacaaaactgaaagttcaygctctctaattagttaatgagacta

SEQ ID NO: 2258 - DNA, 51 bp, Homo sapiens
aatgtaggcttgctgccacaatcaartaagggagcaactaaatagaactca

SEQ ID NO: 2259 - DNA, 51 bp, Homo sapiens
atttgtattagttaccatcctatatraacaaatagaaccaataggatgtat

SEQ ID NO: 2260 - DNA, 51 bp, Homo sapiens
tttctagatgtaaaaggtatagttasaaaacaagtgctctgaaaacaagac

SEQ ID NO: 2261 - DNA, 51 bp, Homo sapiens
gcttctggagagaaatttgatagtgmatagcaaaaataattatgtgtatat

SEQ ID NO: 2262 - DNA, 51 bp, Homo sapiens
atgtatgcatcagaggccttcaaacsagggtgtctatcctcctggggtaca

SEQ ID NO: 2263 - DNA, 51 bp, Homo sapiens
ggtttttagtccacaaatacagagargtaaaatgtagaaaatgagtgagtt

SEQ ID NO: 2264 - DNA, 51 bp, Homo sapiens
ataaactaagcagagtaataggaaasaatggcagaacaaggttaaacaaat

SEQ ID NO: 2265 - DNA, 51 bp, Homo sapiens
tctatggggtctaatagagttcaaaraaatcaagatagcttattttcttgc

SEQ ID NO: 2266 - DNA, 51 bp, Homo sapiens
tctcaaacatttgtggaagctccaaktagtatttgaaattttctgtgaatt

SEQ ID NO: 2267 - DNA, 51 bp, Homo sapiens
tggcctttgaaagtagtttctcttaycttgtgtaacttagctagtcaggca

SEQ ID NO: 2268 - DNA, 51 bp, Homo sapiens
gggggtactcttcacaaaactggccrctatccatccattgcacctatagga

SEQ ID NO: 2269 - DNA, 51 bp, Homo sapiens
tgattataagtgttgcctccaagtayataattaggtcatttccccgaggca

SEQ ID NO: 2270 - DNA, 51 bp, Homo sapiens
agctcttttgtcatttgagactcaasggggatcctctgtagacttctggag

SEQ ID NO: 2271 - DNA, 51 bp, Homo sapiens
gctccatttatacagataatagaacrcgggctctgtgctgctgctgaatgc

SEQ ID NO: 2272 - DNA, 51 bp, Homo sapiens
taatcaattcctggccatgaaacaarttaatgagtctgtccttcgttgctg

SEQ ID NO: 2273 - DNA, 51 bp, Homo sapiens
ctgccacaccaagttaaattttctcwcttccaacaaaacaagtaagcatcc

SEQ ID NO: 2274 - DNA, 51 bp, Homo sapiens
actgggaaagccacaaaaccaagacyagcagtgttacctgccacacctgtg

SEQ ID NO: 2275 - DNA, 51 bp, Homo sapiens
cgttgttgagactcggccttattaayacacttgggattgtaaaggttttta

SEQ ID NO: 2276 - DNA, 51 bp, Homo sapiens
tttgatcactataccagaccattatyataaagacgcttcgaaaaactaaag

SEQ ID NO: 2277 - DNA, 51 bp, Homo sapiens
ctattagtgaaattggatgataatcragaagtatgttttaccttggttcta

SEQ ID NO: 2278 - DNA, 51 bp, Homo sapiens
atccagggccctagtaaagtacccartcatctcttggtaccccacactttg

SEQ ID NO: 2279 - DNA, 51 bp, Homo sapiens
tggatgatctagagtctggtctaacmaatggtaccaaggtttctggcttga

SEQ ID NO: 2280 - DNA, 51 bp, Homo sapiens
tgtaacacatttcaatattactatargaaataactgagacaacctattttt

SEQ ID NO: 2281 - DNA, 51 bp, Homo sapiens
agccaaaacaagccaaactgaataamgattttcctgagatttgtgattctc

SEQ ID NO: 2282 - DNA, 51 bp, Homo sapiens
gctgtatcactcagccattattgtayagtaaccacaaaatctcaaaggaag

SEQ ID NO: 2283 - DNA, 51 bp, Homo sapiens
cctcctgccactcttaccagttcaaygacttaaatctatactacgtgtcat

SEQ ID NO: 2284 - DNA, 51 bp, Homo sapiens
cctcagagtatttttatactgcctaragttctttggagaaagacaaaatgc

SEQ ID NO: 2285 - DNA, 51 bp, Homo sapiens
gagatgccaagacactgctgtgttawgaagttgaatcatgaatttgaatgt

SEQ ID NO: 2286 - DNA, 51 bp, Homo sapiens
tgacgaagaatgtccaattatccacmgtaaaatttggaaaacaccatgaaa

SEQ ID NO: 2287 - DNA, 51 bp, Homo sapiens
tgcatagaattttgcaaagtacccarttcactacccatcttcatatgaagt

SEQ ID NO: 2288 - DNA, 51 bp, Homo sapiens
gatatggatgttatcttttctgatayctccatcaaaggtgagtaaacatgg

SEQ ID NO: 2289 - DNA, 51 bp, Homo sapiens
tggggtttggtcttagaaactcaagwccaattaacttaaacataaagggaa

SEQ ID NO: 2290 - DNA, 51 bp, Homo sapiens
aaacagcaacaacagcaaaaccttayagattatgtacatatgcaataagcg

SEQ ID NO: 2291 - DNA, 51 bp, Homo sapiens
gtacagctctagagtatatacaaaamttatcattcaccttatatgaaatgt

SEQ ID NO: 2292 - DNA, 51 bp, Homo sapiens
agtccataaaataatttaccagtacrcagtctatatatactacctcagaga

SEQ ID NO: 2293 - DNA, 51 bp, Homo sapiens
taatgttgaactctgtcctcaatgcyaaagtttaggatggactctaagttt

SEQ ID NO: 2294 - DNA, 51 bp, Homo sapiens
tctcaaccactttacaaggtagctawaattaagcacattttgctgatgagg

SEQ ID NO: 2295 - DNA, 51 bp, Homo sapiens
aagctgtagcatccctaaaccaagayaaatgtctactatcagtcccaaaca

SEQ ID NO: 2296 - DNA, 51 bp, Homo sapiens
gcttttttaaagaataccttgtaatragctgaaatgcaactttaggagaaa

SEQ ID NO: 2297 - DNA, 51 bp, Homo sapiens
ctaagtataaagctgtttgaaaccayacatgactgaagttagaggggagct

SEQ ID NO: 2298 - DNA, 51 bp, Homo sapiens
tcctccctcatctcaaagggtcctcmaagctctgacgatctaagatacaat

SEQ ID NO: 2299 - DNA, 51 bp, Homo sapiens
ctgatatggaggatgattgaattgaygtgaatctggagaaaggaatacaag

SEQ ID NO: 2300 - DNA, 51 bp, Homo sapiens
ttctgaggactctccagatttttgtsaatgagatctcaatagtcatccatt

SEQ ID NO: 2301 - DNA, 51 bp, Homo sapiens
aaccccaaggccctgtcagataatayggattatgtgcttcatttgaatatg

SEQ ID NO: 2302 - DNA, 51 bp, Homo sapiens
aatgtctacatgacagagttatcaaratgaatgctacaatactttcaaaca

SEQ ID NO: 2303 - DNA, 51 bp, Homo sapiens
tttggactcagaagaatctggctttraatatctgccttaccacattttttt

SEQ ID NO: 2304 - DNA, 51 bp, Homo sapiens
ttttctgtcttctcaggaatgtgtaygtaaacagaatcatgtattttgtga

SEQ ID NO: 2305 - DNA, 51 bp, Homo sapiens
caaatgccaggctggatgatgaaaargagatccctccactccaatatttta

SEQ ID NO: 2306 - DNA, 51 bp, Homo sapiens
ccctgtttatactcgggcctcttgaraacagggaatgtgctttacccattt

SEQ ID NO: 2307 - DNA, 51 bp, Homo sapiens
gaagaattaacacacccttgagtagwaaatgatttgtacctttcactttcc

SEQ ID NO: 2308 - DNA, 51 bp, Homo sapiens
cagatttgattccacatttttaacaktaagcccattttatgcctgtttaga

SEQ ID NO: 2309 - DNA, 51 bp, Homo sapiens
ggtttgaatataaccccacaagatcmatatcctcctggaagctgtgaatgt

SEQ ID NO: 2310 - DNA, 51 bp, Homo sapiens
ttctagtaacggccattaggtgttaygtttgaagttggtttagaagagata

SEQ ID NO: 2311 - DNA, 51 bp, Homo sapiens
gtggggtgatccagtcctcagcaacyacagggaggatccagccactggggc

SEQ ID NO: 2312 - DNA, 51 bp, Homo sapiens
tttttcgacgacgttccactgtctaktaagttagagtgagctcatggccaa

SEQ ID NO: 2313 - DNA, 51 bp, Homo sapiens
gatccacatcctgcctttaaaataayagatttccatgagacacactgaact

SEQ ID NO: 2314 - DNA, 51 bp, Homo sapiens
tactgtaaatctcaagggccataagkaatagcttctttaacccacggatta

SEQ ID NO: 2315 - DNA, 51 bp, Homo sapiens
gaaccacagcttctgtcaacttgcaygtaaaaatatggagttggagatcca

SEQ ID NO: 2316 - DNA, 51 bp, Homo sapiens
acatgagagtcagtggatgtgtgccratctcctgaaactccaggtgcctgg

SEQ ID NO: 2317 - DNA, 51 bp, Homo sapiens
ttttttttaaatatgaaagtactagwaatgagagtctggaaaaaaaaagtt

SEQ ID NO: 2318 - DNA, 51 bp, Homo sapiens
ttttttctatttcctgcaatgaagasagattgattcagaaatgcactgatc

SEQ ID NO: 2319 - DNA, 51 bp, Homo sapiens
tctaggagtaggtccattttgattayacagatggtcacatcagggtactac

SEQ ID NO: 2320 - DNA, 51 bp, Homo sapiens
acaagtgagttttaagagtttaccaygtctaagactgtgagatcagaccac

SEQ ID NO: 2321 - DNA, 51 bp, Homo sapiens
atctaattccatccattctttatggycagttaaatgcagtatacttgtcat

SEQ ID NO: 2322 - DNA, 51 bp, Homo sapiens
atttctcatctaggatgctcctatarctaagaagaaagctgtgtaatttgc

SEQ ID NO: 2323 - DNA, 51 bp, Homo sapiens
aactatattttctactattttgcacygacctaccgtggttcaacttgggag

SEQ ID NO: 2324 - DNA, 51 bp, Homo sapiens
ttggaaacactcactcaaacatgccrgatatttaactgaacttccaattca

SEQ ID NO: 2325 - DNA, 51 bp, Homo sapiens
taattctgtggtttgcgggagtcaarattacatgttccggaaaagcccaaa

SEQ ID NO: 2326 - DNA, 51 bp, Homo sapiens
agctttgccaatgtcagaagcgttcratataaagggagcatgctaggcatc

SEQ ID NO: 2327 - DNA, 51 bp, Homo sapiens
aatattggtcaaaagctatatgatamctgtttgttgcagggaggtagaggt

SEQ ID NO: 2328 - DNA, 51 bp, Homo sapiens
tatgcctacctttatgacttatcaargattcaagtgttccaattgttttat

SEQ ID NO: 2329 - DNA, 51 bp, Homo sapiens
ttctaaaatataataaactggtaacygtaagtaaatgtttcccggagttct

SEQ ID NO: 2330 - DNA, 51 bp, Homo sapiens
taccaggtacactccaactcaaaackagaagaagcttctgtgctcaggacc

SEQ ID NO: 2331 - DNA, 51 bp, Homo sapiens
ctgagcatgaaatgtctctgtttacygaaatgtgacaaaagctcattctct

SEQ ID NO: 2332 - DNA, 51 bp, Homo sapiens
ctaggcggtccttgattaaattcatmactgatttgcttctagaaaactcct

SEQ ID NO: 2333 - DNA, 51 bp, Homo sapiens
atggcagttaagatgcaataatttarccaagaaaactgtgtaggaggagat

SEQ ID NO: 2334 - DNA, 51 bp, Homo sapiens
cgaacttccgtatctttggtacttawcacatcatactaaaaaaatagactt

SEQ ID NO: 2335 - DNA, 51 bp, Homo sapiens
tttctttattcattcattcattgatkaacaaagatttatttggtatcttgg

SEQ ID NO: 2336 - DNA, 51 bp, Homo sapiens
aaagcaggtgataagcagaggtacamctaataatttttgaacttttatatt

SEQ ID NO: 2337 - DNA, 51 bp, Homo sapiens
gaggacaaaatacatgttatcttcartcaatcacatcatctagagataatt

SEQ ID NO: 2338 - DNA, 51 bp, Homo sapiens
tgtataatcattccattattgctagyatattgccaaatatatgcttttatt

SEQ ID NO: 2339 - DNA, 51 bp, Homo sapiens
ttctactaatttcaaatagcaatggrattttgaactatgtaaaatgataga

SEQ ID NO: 2340 - DNA, 51 bp, Homo sapiens
attttattcatcaatgcttcaaataygttgtcatctcccctttcttgggat

SEQ ID NO: 2341 - DNA, 51 bp, Homo sapiens
tcttgggctcttacctaagttctcaygttctaaatagaatttaagctcctt

SEQ ID NO: 2342 - DNA, 51 bp, Homo sapiens
agtgaaatctcttttgaactgactargatttgagccagtaagaaggcagtt

SEQ ID NO: 2343 - DNA, 51 bp, Homo sapiens
tgtatttgatgtatgaaaaatataargcttagaacaatgaagtataagtcc

SEQ ID NO: 2344 - DNA, 51 bp, Homo sapiens
tagaaattaccagccctttgattagmcctgatatgttttatgtatcatagg

SEQ ID NO: 2345 - DNA, 51 bp, Homo sapiens
aagagataagctatctaggataagargagaacttgctggaaatagccagat

SEQ ID NO: 2346 - DNA, 51 bp, Homo sapiens
atggtacaggtaagaccatggttatsaacagcccagtgcatttttctctat

SEQ ID NO: 2347 - DNA, 51 bp, Homo sapiens
ttctacaatctcaaccagtacttcartaatgcaaaaatgcagggggagcag

SEQ ID NO: 2348 - DNA, 51 bp, Homo sapiens
caagaaagcaggtggtactattggastaaagatcaagacaacagcatacaa

SEQ ID NO: 2349 - DNA, 51 bp, Homo sapiens
tcatctaaaagagatcaaatttttaraatcaatctatcacactttaatatg

SEQ ID NO: 2350 - DNA, 51 bp, Homo sapiens
cacgcacacaaacacgcatgcataaygttaaaaagtaaagttcttatagaa

SEQ ID NO: 2351 - DNA, 51 bp, Homo sapiens
cactggatgttctggatgtttccaayggttctggaagttttgtggacactt

SEQ ID NO: 2352 - DNA, 51 bp, Homo sapiens
taaagcaaaagacagagaagttaaaygagatctcagagaggcagagtgcca

SEQ ID NO: 2353 - DNA, 51 bp, Homo sapiens
gggtctgggcaaaggagtacatagaygcaatttctccatcccagaatcatc

SEQ ID NO: 2354 - DNA, 51 bp, Homo sapiens
ccttgtgttttacattcaccatttawctttactttctgtaaaataatgatc

SEQ ID NO: 2355 - DNA, 51 bp, Homo sapiens
agaccattaagaatatatttcaaagrcaagctaacaaagttcaagtaaaaa

SEQ ID NO: 2356 - DNA, 51 bp, Homo sapiens
tctccagtcaagctattaagttaccrcagttcactgaggacatatcacata

SEQ ID NO: 2357 - DNA, 51 bp, Homo sapiens
atgagcagaaaatttacatggaaaamtatggttataaggttataatggtta

SEQ ID NO: 2358 - DNA, 51 bp, Homo sapiens
gtcactgagaagcttttatgactgaycaaatattactcttcaatgcaggca

SEQ ID NO: 2359 - DNA, 51 bp, Homo sapiens
gtgagaggagaagtttctctcataargaaacctccaggcctgtttgaattt

SEQ ID NO: 2360 - DNA, 51 bp, Homo sapiens
tgaattaatggaaaagaaggaaagamtattccagctacttggaaattaatt

SEQ ID NO: 2361 - DNA, 51 bp, Homo sapiens
cctcaccacactctacaatcgtccartaggccactagattttgttgggact

SEQ ID NO: 2362 - DNA, 51 bp, Homo sapiens
gaatattcatgttttgaagtacaaartacatagtgataatggtggtgatga

SEQ ID NO: 2363 - DNA, 51 bp, Homo sapiens
ctgctgtacagcaagattcatgcaaragtctacattttctgctttcaagta

SEQ ID NO: 2364 - DNA, 51 bp, Homo sapiens
taaaattcctggattgggttagatgkagattcaagtcccatctactcctat

SEQ ID NO: 2365 - DNA, 51 bp, Homo sapiens
agtaagcctccctgagcagagagcamaagggaatactcaaggagaagcaca

SEQ ID NO: 2366 - DNA, 51 bp, Homo sapiens
gtggtataaaggactagttatccaaygcccattttcttcctgtaggtaaga

SEQ ID NO: 2367 - DNA, 51 bp, Homo sapiens
tcagtttatggagcttctgagctaawtgaccaatagatttttttttttttt

SEQ ID NO: 2368 - DNA, 51 bp, Homo sapiens
taagaaacatctgaataacaacgatraatgggaaactagtgttgaaatagg

SEQ ID NO: 2369 - DNA, 51 bp, Homo sapiens
gatggaggccgagattggagagattsatctacaagtcaaggaatacaaagg

SEQ ID NO: 2370 - DNA, 51 bp, Homo sapiens
tccacaggtggtttttgtggacacawtgcagtttagaacatcagatctcct

SEQ ID NO: 2371 - DNA, 51 bp, Homo sapiens
tttatattattttcctcctttgtgcyaagtatagagaatatgacctgagac

SEQ ID NO: 2372 - DNA, 51 bp, Homo sapiens
tcatcaatggttttattaggccacartgaatgaggtatacagcctgttcaa

SEQ ID NO: 2373 - DNA, 51 bp, Homo sapiens
aaattccacttttcattatagaatamtacccgaactgctgaaaataaagca

SEQ ID NO: 2374 - DNA, 51 bp, Homo sapiens
gataagatggtcaccctggtaatggkaacagaaacattcaggcctgcaagc

SEQ ID NO: 2375 - DNA, 51 bp, Homo sapiens
tttgggacagagatcttggcataaastcagtacacttaaaggacggtatct

SEQ ID NO: 2376 - DNA, 51 bp, Homo sapiens
aagggccatattgattgaagccttaraaaatatacagaaatttcaaggtat

SEQ ID NO: 2377 - DNA, 51 bp, Homo sapiens
aactgctggcttatttccaaggaaamgcaaatagaggttattgtgtacatt

SEQ ID NO: 2378 - DNA, 51 bp, Homo sapiens
ttggaaaccgaggaaataggaaacasagtaaccaattaaagcaaaacatga

SEQ ID NO: 2379 - DNA, 51 bp, Homo sapiens
ccctgtaactttattgagtttaaaaygcttgaagcagattactgggtttca

SEQ ID NO: 2380 - DNA, 51 bp, Homo sapiens
acaggagctaacaaaaatgctgtagragagagttattgtctcaggcttctc

SEQ ID NO: 2381 - DNA, 51 bp, Homo sapiens
ttagaggagggggcatttgctaaaakcactcaacgaacatgctgttaatgc

SEQ ID NO: 2382 - DNA, 51 bp, Homo sapiens
ttagggtaaagatgtgaaatatttgkagaactctggaaaacatgcccccta

SEQ ID NO: 2383 - DNA, 51 bp, Homo sapiens
tccataaacttccctaggatgcagcrattcacatgccctttcaggagacag

SEQ ID NO: 2384 - DNA, 51 bp, Homo sapiens
cttaaaaatatagatagccaagtgaraaagatataatgcaaactttggggt

SEQ ID NO: 2385 - DNA, 51 bp, Homo sapiens
gaatgcagtattcattatcagtttgyaaatggaacattctcagtagcagga

SEQ ID NO: 2386 - DNA, 51 bp, Homo sapiens
gtctttaattaaaatgaataattccrcctcattaatatcttgacattccta

SEQ ID NO: 2387 - DNA, 51 bp, Homo sapiens
aaaataatgttttcagttacttaaasatcagataaaacacacaaaaaattt

SEQ ID NO: 2388 - DNA, 51 bp, Homo sapiens
ttaataatattgtctagtcacacaarcatataaatctaaacactggtaata

SEQ ID NO: 2389 - DNA, 51 bp, Homo sapiens
ctttgccaaaaaatgctttagttatkaacgcttctgaaagaaactgtcatt

SEQ ID NO: 2390 - DNA, 51 bp, Homo sapiens
gactaatgatatactattatttgacyagaattggctaatttccaacataaa

SEQ ID NO: 2391 - DNA, 51 bp, Homo sapiens
ctgagcatcttaatatatgaaagtaratggtggcagaatgaatgtggctta

SEQ ID NO: 2392 - DNA, 51 bp, Homo sapiens
aagcttgctactatgggttatgtaamagctaacgtcattccaagaaaaatt

SEQ ID NO: 2393 - DNA, 51 bp, Homo sapiens
atcttaaattggagtactctttcacrccaagattgcatagcaaaacatttg

SEQ ID NO: 2394 - DNA, 51 bp, Homo sapiens
ttttaggccttcaaacccagactgcracattattggctctctggctcttaa

SEQ ID NO: 2395 - DNA, 51 bp, Homo sapiens
aggcgctgtttagctatttggcctakatactagtaaactgctttggggttt

SEQ ID NO: 2396 - DNA, 51 bp, Homo sapiens
tcagtggattagattacctttgtgaratggttggctggaggtaaatgcata

SEQ ID NO: 2397 - DNA, 51 bp, Homo sapiens
gccttatgtagaagacagatggataygtgattaatacaaattcttgcttta

SEQ ID NO: 2398 - DNA, 51 bp, Homo sapiens
gaagctttgtttttggagcatgtacrccatttcagtttcaagaggactaat

SEQ ID NO: 2399 - DNA, 51 bp, Homo sapiens
atttgataagcgtatactaatatggrcatgatatattgatgaattagaacc

SEQ ID NO: 2400 - DNA, 51 bp, Homo sapiens
tggaacactatgctttatccatgacyattgatttccaccatttgcttcaaa

SEQ ID NO: 2401 - DNA, 51 bp, Homo sapiens
tataagtgagaacacgcagtattcasctttcaaagattacatactctctat

SEQ ID NO: 2402 - DNA, 51 bp, Homo sapiens
acagggtcctctttcaaatgtgatargttcactgtttctctgaaaaatagc

SEQ ID NO: 2403 - DNA, 51 bp, Homo sapiens
taagtagaagagctaggatcaaatasgtctgttcaatcacaaatcccatgt

SEQ ID NO: 2404 - DNA, 51 bp, Homo sapiens
acatttaaaacatctgtctagcaaastcaacctggaatagtgggtgtgcat

SEQ ID NO: 2405 - DNA, 51 bp, Homo sapiens
gggaaacaaacaaaaagcacactgtytcattgttccacatctgggctccca

SEQ ID NO: 2406 - DNA, 51 bp, Homo sapiens
tttgtgagacaattagcaaaatttgraagagatctgtagatgaaagttagt

SEQ ID NO: 2407 - DNA, 51 bp, Homo sapiens
aagtttcttggatacaagtttctagratatatcatttgtacctgactaatg

SEQ ID NO: 2408 - DNA, 51 bp, Homo sapiens
tacactttcctggagctgggaaaaarcatgagaatgcacctgaataaatat

SEQ ID NO: 2409 - DNA, 51 bp, Homo sapiens
aaatattgtttgtcataaatccaatraatgttgactaactgatatggtttg

SEQ ID NO: 2410 - DNA, 51 bp, Homo sapiens
cctgaaggtagcgtgggacagaatcrccgatttttctacctacacattttg

SEQ ID NO: 2411 - DNA, 51 bp, Homo sapiens
aatgcttacagccccgtgcatgtacraagatgaaaaatcagtgcaattgga

SEQ ID NO: 2412 - DNA, 51 bp, Homo sapiens
aaaaaagaaaggtgttgctctgaaaratgataggtttaaaatgcaagggta

SEQ ID NO: 2413 - DNA, 51 bp, Homo sapiens
ttatagtgttatttaagtttctgagratatgtacaagttactgttaaacaa

SEQ ID NO: 2414 - DNA, 51 bp, Homo sapiens
tccaatagaactctcttgaatagtgraaatgttttacatctgctttgtcca

SEQ ID NO: 2415 - DNA, 51 bp, Homo sapiens
ttcaactatttgggcttaaaattcasattgtgtggtataattaatactaac

SEQ ID NO: 2416 - DNA, 51 bp, Homo sapiens
taaggcaataaaatgaaatcacagartaacagcaaattatccattttaaga

SEQ ID NO: 2417 - DNA, 51 bp, Homo sapiens
aagttcatataaatacatattacaartaccctgagaaataagtgatgtgcc

SEQ ID NO: 2418 - DNA, 51 bp, Homo sapiens
cagcaaaaagacaaatgtccatctaygaattaacaagtacaaaatgaagat

SEQ ID NO: 2419 - DNA, 51 bp, Homo sapiens
ccaggtgggagagggattcctgagartaggtttagagaatgtagaaaaagt

SEQ ID NO: 2420 - DNA, 51 bp, Homo sapiens
tccatgcagatagataaaacgaatakcatgcctttaatcttttccacatag

SEQ ID NO: 2421 - DNA, 51 bp, Homo sapiens
atgagattggtgtcctagcaataaascaatcagttgccctgttttaaattt

SEQ ID NO: 2422 - DNA, 51 bp, Homo sapiens
ttccagagctcagcaaactctaacastacaaaattatcctaaattcgccag

SEQ ID NO: 2423 - DNA, 51 bp, Homo sapiens
gagaagtatcgatcactagaaactayggactgtaatgtcaataaaatactg

SEQ ID NO: 2424 - DNA, 51 bp, Homo sapiens
cattcctcttgtgagctcctgctcaytattcaacacgtggctcaaggtttg

SEQ ID NO: 2425 - DNA, 51 bp, Homo sapiens
gctctggggaaggagcttcctgttayaaatcaagtttggtcagaagagtga

SEQ ID NO: 2426 - DNA, 51 bp, Homo sapiens
gtcaatgaaactttcaacccttaggmactctgcaaattttgctttcaacct

SEQ ID NO: 2427 - DNA, 51 bp, Homo sapiens
agaacagtagttttctttattcttgsaacacctgttaagaggttataggga

SEQ ID NO: 2428 - DNA, 51 bp, Homo sapiens
caccttatttttaatgcaagtataamaattcccatcataaaactcttctga

SEQ ID NO: 2429 - DNA, 51 bp, Homo sapiens
gaacctcaaatagattcaatttagayaggtcctctctgaggcatgttatag

SEQ ID NO: 2430 - DNA, 51 bp, Homo sapiens
gaggaaagatagcatttccaaatagytgaactgtaaaccacctagtttcca

SEQ ID NO: 2431 - DNA, 51 bp, Homo sapiens
tgaagagattgctttgtaaagcacaraacgctgttatcagatcattgaaga

SEQ ID NO: 2432 - DNA, 51 bp, Homo sapiens
gaacaagttgatttcagccctgatgmatgattttgaagggttcaaggccag

SEQ ID NO: 2433 - DNA, 51 bp, Homo sapiens
atgaatgagcaagaaaaggagtttcwtgagatacaatatagtcctggtgaa

SEQ ID NO: 2434 - DNA, 51 bp, Homo sapiens
tcaaataaagctcacccagatgaaasaagaattgcaacactaacagcctgg

SEQ ID NO: 2435 - DNA, 51 bp, Homo sapiens
gttacttgctatattttagaagacaygcatatatttatctacttggatttt

SEQ ID NO: 2436 - DNA, 51 bp, Homo sapiens
aacagaggcacttaggagcccaggayggaaaagagatttaataatataaac

SEQ ID NO: 2437 - DNA, 51 bp, Homo sapiens
ctcccccatcaggttgtgacaactawaatgtctttggacattcccaaatgt

SEQ ID NO: 2438 - DNA, 51 bp, Homo sapiens
aaaatgatgtaaatattccattgtasaggaagacctgcaattatcatccag

SEQ ID NO: 2439 - DNA, 51 bp, Homo sapiens
ttttggggaggctttattaaaaagaygaagattcatatgcactatgagaaa

SEQ ID NO: 2440 - DNA, 51 bp, Homo sapiens
atgtaatactatctcattcacataawctgttgaagagcatacatttcttta

SEQ ID NO: 2441 - DNA, 51 bp, Homo sapiens
taatatcatctaggtgtgtctcagtygaatggccaaatcattaatagtagt

SEQ ID NO: 2442 - DNA, 51 bp, Homo sapiens
ttgtaatttaactgagcctttactcraatacatctgttaatgatagagcca

SEQ ID NO: 2443 - DNA, 51 bp, Homo sapiens
tattatgtattatgtgtaaagttgaygtatgtatgaccataaaaagcagga

SEQ ID NO: 2444 - DNA, 51 bp, Homo sapiens
gtgatgtgaagtcctttgagtgtgayaatggaaaaaatgggattatttctt

SEQ ID NO: 2445 - DNA, 51 bp, Homo sapiens
ttttcattatattttttgagtatgawtatgcacacattagaaagtacaaaa

SEQ ID NO: 2446 - DNA, 51 bp, Homo sapiens
cccaatgctttatcactctagcctckccaaaaatgctaccatcctttaaaa

SEQ ID NO: 2447 - DNA, 51 bp, Homo sapiens
aagctatactgcaatggtccctttamcacattcgtctcctaagcagagaat

SEQ ID NO: 2448 - DNA, 51 bp, Homo sapiens
agattcagaaacaaacaacaaagacyaattggcaaacaaggaaatgctggt

SEQ ID NO: 2449 - DNA, 51 bp, Homo sapiens
agctttaagagttgggagcattataycttttaatgtaaaaagctacctaat

SEQ ID NO: 2450 - DNA, 51 bp, Homo sapiens
atcagggaaaatacggtgcattggakaacctaaggctttgtgcctggggca

SEQ ID NO: 2451 - DNA, 51 bp, Homo sapiens
tttcttcatctgtaatataggaatargactaaatgtgtgaattcttgtgaa

SEQ ID NO: 2452 - DNA, 51 bp, Homo sapiens
tctgaatcagaattttctaccatctsaatgtccttcaaaaacttaccctcc

SEQ ID NO: 2453 - DNA, 51 bp, Homo sapiens
cagtagcccattcaaggtatacaaarttaaaggaatttgtagagggttttg

SEQ ID NO: 2454 - DNA, 51 bp, Homo sapiens
tccctggtcttagagtctgatcttayggtgatattggtctcttctaaatcc

SEQ ID NO: 2455 - DNA, 51 bp, Homo sapiens
tttgcacaggtttatgtgctttaagyatttacaataattgtgatttccctt

SEQ ID NO: 2456 - DNA, 51 bp, Homo sapiens
ttcagtgacatgaggtaaaagatgcrctgtcaaaattgcagtgtctctaag

SEQ ID NO: 2457 - DNA, 51 bp, Homo sapiens
gattatcatacagtctgactttcaastagtatatatttgcttctttttctg

SEQ ID NO: 2458 - DNA, 51 bp, Homo sapiens
catagcggtgcccacctatgtggaayggtttgaagagtcctcgacagggcc

SEQ ID NO: 2459 - DNA, 51 bp, Homo sapiens
taaaaccagaagctatccaagggtamaaacaatctatatagcaattatcct

SEQ ID NO: 2460 - DNA, 51 bp, Homo sapiens
gtaggttattgggaaacagagagaamcttggagtccaaagataggagagga

SEQ ID NO: 2461 - DNA, 51 bp, Homo sapiens
gctatataattttgcatcatgttatrtactgatcacactagagcaacaaat

SEQ ID NO: 2462 - DNA, 51 bp, Homo sapiens
caaaagcaatttggccatggagatamatttgcaatcaccagcaactaaaag

SEQ ID NO: 2463 - DNA, 51 bp, Homo sapiens
tctatggaccactccttaagaatcaytgagatagtgcatgcagactactta

SEQ ID NO: 2464 - DNA, 51 bp, Homo sapiens
aggaattcctcaacctgataaaaagwatctatgaaaatcctacagctaaca

SEQ ID NO: 2465 - DNA, 51 bp, Homo sapiens
ttgcaactctataaagtttctgttayatagctatcagttgattatgataag

SEQ ID NO: 2466 - DNA, 51 bp, Homo sapiens
ttttcatcttgcaaaattgaagctayacccactaaactacatcccattctc

SEQ ID NO: 2467 - DNA, 51 bp, Homo sapiens
tttgtgaactgtttgtaacactgaaygtaaacttagaataagcagatgact

SEQ ID NO: 2468 - DNA, 51 bp, Homo sapiens
ccttaaactacctggtaatttgtatraggctctgttggctggagcccagtg

SEQ ID NO: 2469 - DNA, 51 bp, Homo sapiens
ctcaggtaagacatttctattaagaygtagaaaacacagactttaaaagat

SEQ ID NO: 2470 - DNA, 51 bp, Homo sapiens
tatatatgagaagaaatcagaaaccragaaaatggagactattgtgatgca

SEQ ID NO: 2471 - DNA, 51 bp, Homo sapiens
tggtcaagtttctacccatgtctaayggactcaacacccaaaaattttgtt

SEQ ID NO: 2472 - DNA, 51 bp, Homo sapiens
ttaatccaggtataagaggttttagrcgtttcttactatggacttgcatag

SEQ ID NO: 2473 - DNA, 51 bp, Homo sapiens
gattggaaatgatgaaagccaactckatcagcgggtattgggttcattcct

SEQ ID NO: 2474 - DNA, 51 bp, Homo sapiens
atcaatatgatttatgaaagaccctragcatacaaaattcatggaggatag

SEQ ID NO: 2475 - DNA, 51 bp, Homo sapiens
aagtaagacacataataaaatataaracaaacgtgacaggtttctttgaag

SEQ ID NO: 2476 - DNA, 51 bp, Homo sapiens
ttctaaccaataccatatagcaaaastgattaactgttacttctgcaacta

SEQ ID NO: 2477 - DNA, 51 bp, Homo sapiens
aataaacaggtggtaggagcacagawgaacccaaaagatttcatttttcaa

SEQ ID NO: 2478 - DNA, 51 bp, Homo sapiens
agcagagttgtgagcatatagggcayccagattttaaaattaagtcttgaa

SEQ ID NO: 2479 - DNA, 51 bp, Homo sapiens
tagacagctgccccagtcaacttaaygtctaccacttaatccccaccctat

SEQ ID NO: 2480 - DNA, 51 bp, Homo sapiens
aatcacaagtgtagtgatttaaacasggtatcagtggctttacgcatccat

SEQ ID NO: 2481 - DNA, 51 bp, Homo sapiens
ttgagatcataaggaagataatgcasactttattctcaaatacagctccca

SEQ ID NO: 2482 - DNA, 51 bp, Homo sapiens
catcaacaatatctggatgcctactyacaatgattatgtcaccttaaatca

SEQ ID NO: 2483 - DNA, 51 bp, Homo sapiens
acaaatttatcatgtatccagtatawgctaaacattatcccagatacaaag

SEQ ID NO: 2484 - DNA, 51 bp, Homo sapiens
aaatgaacaaagttaatgcaaaagartatcgagggtactctgatagaagtg

SEQ ID NO: 2485 - DNA, 51 bp, Homo sapiens
aaataagattatttctatagagaagsctgaaatatgatcatacttgctcaa

SEQ ID NO: 2486 - DNA, 51 bp, Homo sapiens
agtgtagacagtgagtgtaacatcargcataagataaatgagactctgctt

SEQ ID NO: 2487 - DNA, 51 bp, Homo sapiens
ctggaagagccaactcattgtcgaargagaagaatgaagtgggagaagtga

SEQ ID NO: 2488 - DNA, 51 bp, Homo sapiens
aaagtttataaatgaatagtaaaaakaatttcaaatgtaatattcaaactt

SEQ ID NO: 2489 - DNA, 51 bp, Homo sapiens
gtcaaaaatctacccacaattaagcmgccagatagaacatcttcaaacata

SEQ ID NO: 2490 - DNA, 51 bp, Homo sapiens
gggctgagttgtgaagaatgactacractgcactggtgaagggcctgagac

SEQ ID NO: 2491 - DNA, 51 bp, Homo sapiens
tttagcctgatatttacatcttctcratatctcactgaattctgttctttg

SEQ ID NO: 2492 - DNA, 51 bp, Homo sapiens
gtgctaagtctcctattcatcacggyatctttcattgcagtcttaatttaa

SEQ ID NO: 2493 - DNA, 51 bp, Homo sapiens
tttgtgttaatcttataatcgatggraagtcattaaccacttaagaggaga

SEQ ID NO: 2494 - DNA, 51 bp, Homo sapiens
tcttagccaggaaatgctttctctamtagacaccaatatccattgaaatcc

SEQ ID NO: 2495 - DNA, 51 bp, Homo sapiens
gaatccagtgctcaccctactcgccrcagaaatgactgctgtccacgcagg

SEQ ID NO: 2496 - DNA, 51 bp, Homo sapiens
taaaagtatcacatgtattaggtaayatggacttaataaatagatctttag

SEQ ID NO: 2497 - DNA, 51 bp, Homo sapiens
tgatatactttcttcaaatgagttaygtagaatcttataaaattttcttta

SEQ ID NO: 2498 - DNA, 51 bp, Homo sapiens
gagaaatgcacaccacataactaaaygaattgttgtctaccttgattatga

SEQ ID NO: 2499 - DNA, 51 bp, Homo sapiens
gaaaagagatggggagttgctggaastataaaaggtaagttttgagatgtt

SEQ ID NO: 2500 - DNA, 51 bp, Homo sapiens
accattgttttttagttctttttcaygggatttattactatcagaaaatat

SEQ ID NO: 2501 - DNA, 51 bp, Homo sapiens
agaaactactttgggtccattcagcrcaatcttcctcattctgctcaggac

SEQ ID NO: 2502 - DNA, 51 bp, Homo sapiens
ctgaataccaatatgaaagaggcttsaagaacttggatagtaagccccagg

SEQ ID NO: 2503 - DNA, 51 bp, Homo sapiens
ataaggttttccgggaaacactaaaytgcgttaacattctgctgaagttat

SEQ ID NO: 2504 - DNA, 51 bp, Homo sapiens
ataaattatgtggtgaaaaaagtacrggactggaaagcaacagatctgggt

SEQ ID NO: 2505 - DNA, 51 bp, Homo sapiens
agtgccacatgtacattaatctaaakggaacattcctcagtgattatttat

SEQ ID NO: 2506 - DNA, 51 bp, Homo sapiens
actaaatctgaggaagatggtgaaaygtcagaacagcaagtaaaattcttc

SEQ ID NO: 2507 - DNA, 51 bp, Homo sapiens
tccataggttgccaaaatatgtcctyaagatgtggtttaacattctgtgtt

SEQ ID NO: 2508 - DNA, 51 bp, Homo sapiens
ttttggcaacctatggaaatcctaaytgagtatctgttaatgctctgtttt

SEQ ID NO: 2509 - DNA, 51 bp, Homo sapiens
cttagtattcttccaagttaatcggyatagatgacccttgacaattttttt

SEQ ID NO: 2510 - DNA, 51 bp, Homo sapiens
gtggggttcaaaagaacttgtacatsaagtagatctgagtggagatggcca

SEQ ID NO: 2511 - DNA, 51 bp, Homo sapiens
cacattatcccaggttggcgtctcastcatttctaagtattggcactgtct

SEQ ID NO: 2512 - DNA, 51 bp, Homo sapiens
tgagtggaaacctaactttacaagaragcttactccacttacagacacctt

SEQ ID NO: 2513 - DNA, 51 bp, Homo sapiens
tgtcctgtgtattaatgtgtgtaaaygtagcttagaactactatgggtaac

SEQ ID NO: 2514 - DNA, 51 bp, Homo sapiens
acacatcagagattatctcattaatkaagtaaccggaaggacgatcaagct

SEQ ID NO: 2515 - DNA, 51 bp, Homo sapiens
gtttcaaatagtcatgaatagccagrccataataccctgcacctgcctgga

SEQ ID NO: 2516 - DNA, 51 bp, Homo sapiens
aaaacaaaagactgaggagatgtcayaggttgaaggaaactaaagagatcc

SEQ ID NO: 2517 - DNA, 51 bp, Homo sapiens
gttggttttggcttttggttgttacrattcttacatatgttataagcccct

SEQ ID NO: 2518 - DNA, 51 bp, Homo sapiens
tttttgtgtgtatttttaaaaattawgtattcacaaaatccaatagaagag

SEQ ID NO: 2519 - DNA, 51 bp, Homo sapiens
gcacatcttttacatctacaaagtasagatgatcatggtaatgccaacctc

SEQ ID NO: 2520 - DNA, 51 bp, Homo sapiens
gtaggtttctctgtcctgataaagayaggtaattactaggatcacactgtt

SEQ ID NO: 2521 - DNA, 51 bp, Homo sapiens
tggataataaaattgtaatggatgcraagaagtgattactaggaaagccag

SEQ ID NO: 2522 - DNA, 51 bp, Homo sapiens
attcctttcttgctgattgctgatcrctaggttggctccctgataccctga

SEQ ID NO: 2523 - DNA, 51 bp, Homo sapiens
cccagagaaacagatgatgagaataygaaggaaaagatatgtttagaattt

SEQ ID NO: 2524 - DNA, 51 bp, Homo sapiens
tggagaacctctaattcagtcatgtmtttccacagatggggagatagaagc

SEQ ID NO: 2525 - DNA, 51 bp, Homo sapiens
taaacagtagctactaacattatcawcactaaacgaaatgtttgctgttca

SEQ ID NO: 2526 - DNA, 51 bp, Homo sapiens
gcctcagctgcctcctctgcacaatragggcaagagtcaggctctggagcg

SEQ ID NO: 2527 - DNA, 51 bp, Homo sapiens
tcttttttttaaagggaataccgtamcttatatataaaggcatcaaagtaa

SEQ ID NO: 2528 - DNA, 51 bp, Homo sapiens
ttatccaagtttcatttacctcatayctagtgtttcatctcatccttagct

SEQ ID NO: 2529 - DNA, 51 bp, Homo sapiens
agagatgttgagccagagaatcctgytaagcaatacccagattcttgacct

SEQ ID NO: 2530 - DNA, 51 bp, Homo sapiens
ctttctcttctataatcacttttacwatggtaataattatggacacatttt

SEQ ID NO: 2531 - DNA, 51 bp, Homo sapiens
tgcactttctgcattcgtgagcctayctgcaagcacagagggtttgatcta

SEQ ID NO: 2532 - DNA, 51 bp, Homo sapiens
gcatcatttaataaagcagggtcccrgatttacagacctttgtttgagttc

SEQ ID NO: 2533 - DNA, 51 bp, Homo sapiens
ttaatttacttactgtctctctacaytcaccaaattataagcattataaga

SEQ ID NO: 2534 - DNA, 51 bp, Homo sapiens
catggtaatgatacaggagttaagargaaactaattagtcagatagtgagg

SEQ ID NO: 2535 - DNA, 51 bp, Homo sapiens
tgtgacacacagcctgccttatgtcragaactgtcagagaggacaaggaga

SEQ ID NO: 2536 - DNA, 51 bp, Homo sapiens
gttatgattgtctctacatctccaayatctaacacaaggcctggatgctcc

SEQ ID NO: 2537 - DNA, 51 bp, Homo sapiens
tagttctcccagcagccctaagagayagtaagtcataacaatgacttccac

SEQ ID NO: 2538 - DNA, 51 bp, Homo sapiens
caagaagtgcttgttccttggaatascaggataggcagttgttagcacatg

SEQ ID NO: 2539 - DNA, 51 bp, Homo sapiens
taaatgaaggcactgaccaaacatascaatgacgaaaacaaccaccaccag

SEQ ID NO: 2540 - DNA, 51 bp, Homo sapiens
actcccaatttaattgcttgtgtaaytagagttaattgcagagtagaggtt

SEQ ID NO: 2541 - DNA, 51 bp, Homo sapiens
gctctttaatcagtacctggttctaygacttcatcaacatccagttagagc

SEQ ID NO: 2542 - DNA, 51 bp, Homo sapiens
tttacaataagaaatggagttggcaygggcactaggaactgcatccttatt

SEQ ID NO: 2543 - DNA, 51 bp, Homo sapiens
gctttaccagatgccgaatacccatkactgtttaggtctatttctagactt

SEQ ID NO: 2544 - DNA, 51 bp, Homo sapiens
cttggtgatttcataatctccttaaygcagagaaaggtagcaagtggatgg

SEQ ID NO: 2545 - DNA, 51 bp, Homo sapiens
cagcaggacgatgacaaagcctaaarccaaaccatggataggtgtgactaa

SEQ ID NO: 2546 - DNA, 51 bp, Homo sapiens
gagaaaacagcacatgtaaaggaaaygcccgcttagtctggaggtagcagg

SEQ ID NO: 2547 - DNA, 51 bp, Homo sapiens
ttgaagtgaatacttgtcaagtcatwacaaggagaaatgtctctaattaaa

SEQ ID NO: 2548 - DNA, 51 bp, Homo sapiens
cagggaagttacagtcaattgcttaraggttatttagtaaataaatggcaa

SEQ ID NO: 2549 - DNA, 51 bp, Homo sapiens
atgtcttggactttttagcaactgaycataaaagtctgaaggatggatttc

SEQ ID NO: 2550 - DNA, 51 bp, Homo sapiens
tccatttaggtgcagatttgtcacastcattaaacagtcttcagtttttct

SEQ ID NO: 2551 - DNA, 51 bp, Homo sapiens
gattatttgaggctgagataataaaytgtctaagaagcaaccatttttctc

SEQ ID NO: 2552 - DNA, 51 bp, Homo sapiens
tgctgtaataaatgaaattcttctcmatctaaggttagtttgatctcactt

SEQ ID NO: 2553 - DNA, 51 bp, Homo sapiens
tagtggttatttgtagtaaatttgcygagaaccttaaagcaggattcctca

SEQ ID NO: 2554 - DNA, 51 bp, Homo sapiens
catgaacacatcttagcatgaaaacmgttgcatgggattcaaacaacagga

SEQ ID NO: 2555 - DNA, 51 bp, Homo sapiens
gaaaatttatgttacaacttacagaytccattttctatctctctgcaccaa

SEQ ID NO: 2556 - DNA, 51 bp, Homo sapiens
ccataaaagggtcatattgtccaacraactggggaggaacggtgaaactga

SEQ ID NO: 2557 - DNA, 51 bp, Homo sapiens
cccccgcccgattagagtccgtccartgaatatctgtttaacagaataatc

SEQ ID NO: 2558 - DNA, 51 bp, Homo sapiens
actttacatacataagcactatatgratgcgactagaaatttagaaataat

SEQ ID NO: 2559 - DNA, 51 bp, Homo sapiens
atgactctccatcaaattaaattgcwtgttcttggaggaggggggaggtaa

SEQ ID NO: 2560 - DNA, 51 bp, Homo sapiens
aggtggaaaaactggactttcttggmggtagatgccacatgtgtggtttaa

SEQ ID NO: 2561 - DNA, 51 bp, Homo sapiens
tgtaatcttaggaaagatacttcaayggatgttcatatgcctattaagtgg

SEQ ID NO: 2562 - DNA, 51 bp, Homo sapiens
aatttgtgataaaagtttaatttggrcagaacattggcaatactaagcatg

SEQ ID NO: 2563 - DNA, 51 bp, Homo sapiens
tatggaggaggtcaaagaatgaatgrcaatttgacatgaagaggttgattt

SEQ ID NO: 2564 - DNA, 51 bp, Homo sapiens
tttagaacttgaaagtgaggaaggtsaaagattatccatggagatttaggt

SEQ ID NO: 2565 - DNA, 51 bp, Homo sapiens
cattagatctgtgttaattagttagyactccactgcacatgctaatgactt

SEQ ID NO: 2566 - DNA, 51 bp, Homo sapiens
tattgaataagtccaaacatttccakgaaagacataaaggcatccttgttt

SEQ ID NO: 2567 - DNA, 51 bp, Homo sapiens
aattgccttccctgggtatcagtaamaaccacctcttctagaatggacttc

SEQ ID NO: 2568 - DNA, 51 bp, Homo sapiens
tgctcgaaaaatggttccagcctcasaatggaaaccaaagtgaaaagtaag

SEQ ID NO: 2569 - DNA, 51 bp, Homo sapiens
tatattaggtaactgcatgtaaaacragtccagaacttgaatggagttgtt

SEQ ID NO: 2570 - DNA, 51 bp, Homo sapiens
agctggtatactattgtccacagtayatttttgatttatgttccaaaatct

SEQ ID NO: 2571 - DNA, 51 bp, Homo sapiens
tttgagcttctagtaatcattctccracaaataaagatgacttctaaagta

SEQ ID NO: 2572 - DNA, 51 bp, Homo sapiens
gcattttcattgctatatgatactcyaaatggaatcctatgcagacatcat

SEQ ID NO: 2573 - DNA, 51 bp, Homo sapiens
aacaattctttttggataagtttacygagtctatgaatgaactaataaatg

SEQ ID NO: 2574 - DNA, 51 bp, Homo sapiens
ctagataagccacctgtcttctgtaygtaagccactatgtaaacctaccac

SEQ ID NO: 2575 - DNA, 51 bp, Homo sapiens
ctattcctcattaagtctttaccaaytcagtcaatgtcatcactgaccatg

SEQ ID NO: 2576 - DNA, 51 bp, Homo sapiens
tgtccaaaaccaaccataatggtcartcatttctggatttactcaaacttt

SEQ ID NO: 2577 - DNA, 51 bp, Homo sapiens
gtctttgatgtcaggtatgggaataragatgactacccctctttcacttcc

SEQ ID NO: 2578 - DNA, 51 bp, Homo sapiens
aaaattgacattataataaatagtayctatgttacaaagttttttgtgtgg

SEQ ID NO: 2579 - DNA, 51 bp, Homo sapiens
atttccaactggaaacaaattcttasgctactaggtctctagagattatct

SEQ ID NO: 2580 - DNA, 51 bp, Homo sapiens
aaagccatgagctgtatgaaggtccraaggaggtaattttccttagtagta

SEQ ID NO: 2581 - DNA, 51 bp, Homo sapiens
ccacattttgtaccttactaaaactsagagttgtcttatctggaaagccag

SEQ ID NO: 2582 - DNA, 51 bp, Homo sapiens
gttatgtaggaatataacatgaatamtatggtgagttgtcaagcatgaagg

SEQ ID NO: 2583 - DNA, 51 bp, Homo sapiens
aatttcacttttattcatagtgtgayagagttggctattagattaaatgag

SEQ ID NO: 2584 - DNA, 51 bp, Homo sapiens
aaaatgtacaagttgatcattttcaygtgcttaagttctactgtaaaacta

SEQ ID NO: 2585 - DNA, 51 bp, Homo sapiens
atcagattctttttaaaactctgacrctgtcaaatacatcagcttgtggtt

SEQ ID NO: 2586 - DNA, 51 bp, Homo sapiens
aagtcattttgccagcaagcaattayagtaagcccagtgaatgccccaaac

SEQ ID NO: 2587 - DNA, 51 bp, Homo sapiens
acattattgcatgtcaaatccatatyacaattacttcatttgtcccaaaat

SEQ ID NO: 2588 - DNA, 51 bp, Homo sapiens
aaggtaacaagtatttcagggtaacratggatgatgaagaagtaggaaaga

SEQ ID NO: 2589 - DNA, 51 bp, Homo sapiens
ttaaaaatcagtggcaataaaagagracctataactaccagtagatattca

SEQ ID NO: 2590 - DNA, 51 bp, Homo sapiens
aatggagaaaatgaaagctagaaaaygtatttcaatactaagcagtgcaac

SEQ ID NO: 2591 - DNA, 51 bp, Homo sapiens
gctttcattttctccattatatttcycattatctgatgactgaataggtta

SEQ ID NO: 2592 - DNA, 51 bp, Homo sapiens
agctgaattttagaggagaggaaacrgaattaattagttagatagtaagtt

SEQ ID NO: 2593 - DNA, 51 bp, Homo sapiens
aaacttgttttaaatcatacagaaawtaagtaggaaaatcgtcatttgaac

SEQ ID NO: 2594 - DNA, 51 bp, Homo sapiens
tcttagctaaaaatagaatagcaatwaaacctacttctttgggtttctgtg

SEQ ID NO: 2595 - DNA, 51 bp, Homo sapiens
gctgatgacctttaaaccaatgacaytgaccttgtttcaagcactagtctc

SEQ ID NO: 2596 - DNA, 51 bp, Homo sapiens
ctcagtttattccaataagcttgtamaaatatttcttaggtgtttatgtcc

SEQ ID NO: 2597 - DNA, 51 bp, Homo sapiens
tagccaattaaagtgtatgctcttgyaaatatcatggttttggtttttgct

SEQ ID NO: 2598 - DNA, 51 bp, Homo sapiens
tatctggattaggaaaaagaataaartaagcaaagaaatgaactctggatc

SEQ ID NO: 2599 - DNA, 51 bp, Homo sapiens
accatgtagtaatgaaaaaatatgakgaaattgattaaaattatgttgatt

SEQ ID NO: 2600 - DNA, 51 bp, Homo sapiens
ttcattttgttggctagaagtgttasaagggaaatttggttccagttgttc

SEQ ID NO: 2601 - DNA, 51 bp, Homo sapiens
atacgatcctgatctgaaccaaataratgtgagaaatgttcatcaaaacaa

SEQ ID NO: 2602 - DNA, 51 bp, Homo sapiens
aatgctgaagccaagacaaataagaygaaaacatgcaaaggctgcaagctc

SEQ ID NO: 2603 - DNA, 51 bp, Homo sapiens
agttccagattggaggtaccatataratgtttattcctggatcaatttggt

SEQ ID NO: 2604 - DNA, 51 bp, Homo sapiens
ctgccacagaaacaccaatttaacartgatatatgaacccaaatatcttta

SEQ ID NO: 2605 - DNA, 51 bp, Homo sapiens
ttgagaccagagtttgaatacttcaratcataactgttaagtctgagaatg

SEQ ID NO: 2606 - DNA, 51 bp, Homo sapiens
cattcagtactatctctgaaaaataragttgttcaaatttgaggcctttaa

SEQ ID NO: 2607 - DNA, 51 bp, Homo sapiens
cgataaatactttctgaatgactaartgaacacagaggcatacgggaattc

SEQ ID NO: 2608 - DNA, 51 bp, Homo sapiens
gggcaacagtcatccaaatgagggartagaaatggcgagttcaacaagcag

SEQ ID NO: 2609 - DNA, 51 bp, Homo sapiens
aagactcgcttgtgtaacgttgagayagatgtcatactgctggtccaggcc

SEQ ID NO: 2610 - DNA, 51 bp, Homo sapiens
accaaggtttctagttgctctcatawcctttttgaagtattttatgcattg

SEQ ID NO: 2611 - DNA, 51 bp, Homo sapiens
gacagaagtgtactctgggagtcaaygaaaaagaacaggtgctttccatct

SEQ ID NO: 2612 - DNA, 51 bp, Homo sapiens
gacctagtttccattagagaaaagaygtgccagagagagaattttttttct

SEQ ID NO: 2613 - DNA, 51 bp, Homo sapiens
gttacagcatctttctttcttgcatytgagctttaacgttgagtgcttggt

SEQ ID NO: 2614 - DNA, 51 bp, Homo sapiens
gggcttcatagcatcctaaagcctaygcaatttgagaggccctctttcaaa

SEQ ID NO: 2615 - DNA, 51 bp, Homo sapiens
aaacaatctgaccgaattgtccctargttgtgaatgttacatcctcttagc

SEQ ID NO: 2616 - DNA, 51 bp, Homo sapiens
tgatctaattatcatgtcttttatcrcaggcaaaagtagaaataaaacatg

SEQ ID NO: 2617 - DNA, 51 bp, Homo sapiens
tttggaaactgatgtgtttctatacygaggagaaaacagtttaaattgtgt

SEQ ID NO: 2618 - DNA, 51 bp, Homo sapiens
agctagatggatggaggtgccattawctggaatgggaaaactagaaaaaca

SEQ ID NO: 2619 - DNA, 51 bp, Homo sapiens
gagagagtatctcaagaatttaataygttaagtttgagatgcttacaagac

SEQ ID NO: 2620 - DNA, 51 bp, Homo sapiens
ctgtcaatcaaaagggagatacggargaagtatagagcagataacactgtg

SEQ ID NO: 2621 - DNA, 51 bp, Homo sapiens
acccagatctggtattacagaataargaatagattgtagggaggccattga

SEQ ID NO: 2622 - DNA, 51 bp, Homo sapiens
tttctctcacctgaactattaggaartcttgctaccattaatattcatagt

SEQ ID NO: 2623 - DNA, 51 bp, Homo sapiens
catcattatacattatatgggagaawtatcttatagtgaaactgaaggaag

SEQ ID NO: 2624 - DNA, 51 bp, Homo sapiens
ccagcctgctgcttacaatgtgttakagatgcttctcagggaggattgctg

SEQ ID NO: 2625 - DNA, 51 bp, Homo sapiens
acatctattctaattaaaaacaccaytgataatcgtttacaagtgcaagat

SEQ ID NO: 2626 - DNA, 51 bp, Homo sapiens
gttgttttgccttatttgtattcagrcataatacttggcttcagaacatta

SEQ ID NO: 2627 - DNA, 51 bp, Homo sapiens
gacctatgccaatcaaaatagaagakgactgtcctataaattcatagcacc

SEQ ID NO: 2628 - DNA, 51 bp, Homo sapiens
attttattagattaaacaatttttarcagacctcatgcttgttggagataa

SEQ ID NO: 2629 - DNA, 51 bp, Homo sapiens
atacagaaatgtaaagggtcaagaayagcagtcagtcttgagaatgaagca

SEQ ID NO: 2630 - DNA, 51 bp, Homo sapiens
acataagataaagcaaactgaagcakatttctgtatactgacttatacaaa

SEQ ID NO: 2631 - DNA, 51 bp, Homo sapiens
gaatttaagccatcctaaagtgagaygtcacagaattaaactaagaaagta

SEQ ID NO: 2632 - DNA, 51 bp, Homo sapiens
taatcacgttgtattagcaatttgaygaatcagttatttcatgaacacatt

SEQ ID NO: 2633 - DNA, 51 bp, Homo sapiens
aactgttcatttcaatgggattctgsaaatgtcgtagcttcaaggatgttc

SEQ ID NO: 2634 - DNA, 51 bp, Homo sapiens
agtcaatgttttccttctatttctcycagaggtctaaacatctctaaacta

SEQ ID NO: 2635 - DNA, 51 bp, Homo sapiens
tctaatgactgcaaatgttggcctcratctatatgctttgctggcattatt

SEQ ID NO: 2636 - DNA, 51 bp, Homo sapiens
tgttggcactatgtctaatagcccaracccagtaaaggagaaaagcagtct

SEQ ID NO: 2637 - DNA, 51 bp, Homo sapiens
ttctctagaattactgatactatgargttgcaaaaatagcagccttggaat

SEQ ID NO: 2638 - DNA, 51 bp, Homo sapiens
gagattcaaaaatacatatatttgawaaaagacttcatatccacaatatat

SEQ ID NO: 2639 - DNA, 51 bp, Homo sapiens
aaggataatggcttccagttccaccmatgtttctgcaaaggacatgatttc

SEQ ID NO: 2640 - DNA, 51 bp, Homo sapiens
acattacagtttgtcaggactctacyaaatacaatttaaccctgttttaca

SEQ ID NO: 2641 - DNA, 51 bp, Homo sapiens
cacacacagccaatccatcgtagaamcatcctgttgagatcagacttgaat

SEQ ID NO: 2642 - DNA, 51 bp, Homo sapiens
gctgactggtctcatttaaaaacaaytaccctacatctcaagaaggcaccc

SEQ ID NO: 2643 - DNA, 51 bp, Homo sapiens
atttatttgttttctactagcagaaytgagttattcaaattgacagtctct

SEQ ID NO: 2644 - DNA, 51 bp, Homo sapiens
ggcaaacctgaaaatgaaaggataarttagtaagaaaaagagaaacatcct

SEQ ID NO: 2645 - DNA, 51 bp, Homo sapiens
ggcagcattcatatatgattgcttakgtaaggtatgtatgtgaatatttaa

SEQ ID NO: 2646 - DNA, 51 bp, Homo sapiens
tgcatttatgcatatgaaagcttagrcctctttactgcatggaatcttcta

SEQ ID NO: 2647 - DNA, 51 bp, Homo sapiens
ccaccctttagaggactcggttaagyactgtctagtgttctcctctaagaa

SEQ ID NO: 2648 - DNA, 51 bp, Homo sapiens
agacctttatttgctctgcttttaastattatatatatttagctattaact

SEQ ID NO: 2649 - DNA, 51 bp, Homo sapiens
aacagtttcttttgtaaactaaatgyacttgcaatcatatattagcatgtg

SEQ ID NO: 2650 - DNA, 51 bp, Homo sapiens
tctctgatttagatatattaagcatsatcagttttagatatttggtgaaaa

SEQ ID NO: 2651 - DNA, 51 bp, Homo sapiens
tttttgttttaaaggcatttttgtawgactgaaaacagtaggtattattcc

SEQ ID NO: 2652 - DNA, 51 bp, Homo sapiens
acacacatctctaatggaactgagawattttattacactttgactttccaa

SEQ ID NO: 2653 - DNA, 51 bp, Homo sapiens
ccaaagttaaggcctactggtattgmattggtaatcagaaatgtttaccag

SEQ ID NO: 2654 - DNA, 51 bp, Homo sapiens
tagatgtttgatttaactggtcttamatgatccttaaatgactctaatttc

SEQ ID NO: 2655 - DNA, 51 bp, Homo sapiens
cctgtcagctttcctgtgtcttagakatttagtttttggagttcctggtat

SEQ ID NO: 2656 - DNA, 51 bp, Homo sapiens
aaatccagtaatatggccaagtaaaygactggaataaccagatgaaagaat

SEQ ID NO: 2657 - DNA, 51 bp, Homo sapiens
aactgacagccaaagtgtgcttttawatcaactgttgtatcagggtctgag

SEQ ID NO: 2658 - DNA, 51 bp, Homo sapiens
catcaaattctccacagattaaaaaycatcatcctaataactgaacccagt

SEQ ID NO: 2659 - DNA, 51 bp, Homo sapiens
cttactctctaagtgatgttcctcayagtaatgactgtttctcaggaagag

SEQ ID NO: 2660 - DNA, 51 bp, Homo sapiens
ttaaaaagtttataaagtcaaaaaaytacagttagctaaagttaatttatt

SEQ ID NO: 2661 - DNA, 51 bp, Homo sapiens
gaggatactagctctatcctgaatamctcatgagattgtcgtataaaataa

SEQ ID NO: 2662 - DNA, 51 bp, Homo sapiens
tgcatggcaaataggtttgtaagtgsatttattaccatctccatatagtat

SEQ ID NO: 2663 - DNA, 51 bp, Homo sapiens
gtacaaaaaatatttgagggctatcrctgatttaatcatttgcatttgtga

SEQ ID NO: 2664 - DNA, 51 bp, Homo sapiens
acaatgccaacatgatgactaccagyataaggcagagggtgtctaacgaga

SEQ ID NO: 2665 - DNA, 51 bp, Homo sapiens
ctattttcaaagggagagtcttttayctcaatgcttagactgacaggcaat

SEQ ID NO: 2666 - DNA, 51 bp, Homo sapiens
atctgaatactgcataccctatagcmaataattttcagggaagcatagcta

SEQ ID NO: 2667 - DNA, 51 bp, Homo sapiens
gaactgagagacaactgggaggttcygattttgttgtctgggaggatggga

SEQ ID NO: 2668 - DNA, 51 bp, Homo sapiens
tgaccagttggaagaaggaagcaatktgagttgaaaaaagatgcctcataa

SEQ ID NO: 2669 - DNA, 51 bp, Homo sapiens
aagtagcaaagacttggtggattaasagcagatatttattttctcacaatt

SEQ ID NO: 2670 - DNA, 51 bp, Homo sapiens
aagagaccactgtgatacattaagawtattgctataagggagcatgtgcaa

SEQ ID NO: 2671 - DNA, 51 bp, Homo sapiens
ttgtttttctctttcttttttaaatsatcaggaatgaagtgtattctgtct

SEQ ID NO: 2672 - DNA, 51 bp, Homo sapiens
tactaattttaagacgaaggcaatayggctaagtttacacacatacacaga

SEQ ID NO: 2673 - DNA, 51 bp, Homo sapiens
gtatgttattcacgaattcagtgaaraccttgggaggaatgggttagcaaa

SEQ ID NO: 2674 - DNA, 51 bp, Homo sapiens
caaagtaagcttcacgtgagcccagracacaactgcagttcagatagtgga

SEQ ID NO: 2675 - DNA, 51 bp, Homo sapiens
ggagaaagagttctatcatctcccartcctagtatcttcttttaatcagta

SEQ ID NO: 2676 - DNA, 51 bp, Homo sapiens
aaattaatcgtagttgggtacatacratatataaagtatatattaacctta

SEQ ID NO: 2677 - DNA, 51 bp, Homo sapiens
gaagtcatgaacctgctgggcttccrctctgttacctgtgaaataattgat

SEQ ID NO: 2678 - DNA, 51 bp, Homo sapiens
cgaactcatcccaatagtatttctcygaagggacactggtaagcttgtcca

SEQ ID NO: 2679 - DNA, 51 bp, Homo sapiens
actcgagaaagatgcaagtgtggaayatgaagtgaaacagagaaagaacgt

SEQ ID NO: 2680 - DNA, 51 bp, Homo sapiens
gaaaacctctgctcatgaccacttamagcaacagcctgttctaatttattt

SEQ ID NO: 2681 - DNA, 51 bp, Homo sapiens
actacaaatagcctgatgcccgttaycatttgaagggtagaaaactgaaac

SEQ ID NO: 2682 - DNA, 51 bp, Homo sapiens
gagctaagaaagctaaagagcaaaamttaaattgtaagtgactttaatgtg

SEQ ID NO: 2683 - DNA, 51 bp, Homo sapiens
gcctggcaccagtcaagtaagcaagwcttcccacagtgaggggacctgagt

SEQ ID NO: 2684 - DNA, 51 bp, Homo sapiens
ttcttttctttcttaaactttggacygagccactttctcagaagcacagct

SEQ ID NO: 2685 - DNA, 51 bp, Homo sapiens
aagtcaagatcaagagacagcattawtaacagaaacacacacttaagtcac

SEQ ID NO: 2686 - DNA, 51 bp, Homo sapiens
cataaaacacagatatcatagtgaayatttcctgaggtaaaatctctacat

SEQ ID NO: 2687 - DNA, 51 bp, Homo sapiens
aattagaaaaagagaggaaaacggayctctatgggccaaatcctgtgcagg

SEQ ID NO: 2688 - DNA, 51 bp, Homo sapiens
ctgatacagaagttcaattttttaargacatgttcaatttattctttttca

SEQ ID NO: 2689 - DNA, 51 bp, Homo sapiens
tgagaatgggccaggagagttgagasgccaatagaaacttgaacagctttc

SEQ ID NO: 2690 - DNA, 51 bp, Homo sapiens
atgcagccctcatctttgcaaataamgttttaaaatacggccttctgtagt

SEQ ID NO: 2691 - DNA, 51 bp, Homo sapiens
ggtgaatttacaaattttttctcaayaatcacaaatgtaaatgtgtatgaa

SEQ ID NO: 2692 - DNA, 51 bp, Homo sapiens
aggtttatcttgagaatgaaacgcartcctgtatgagaggtgctttggaac

SEQ ID NO: 2693 - DNA, 51 bp, Homo sapiens
gtcgatcctgataaaatagcatccaycagtagtttagtgagcgactactat

SEQ ID NO: 2694 - DNA, 51 bp, Homo sapiens
gtgtggtcccccacactctaaactayggaccatcaaactacatcctgtaga

SEQ ID NO: 2695 - DNA, 51 bp, Homo sapiens
taaaagccatcaatgacaaatttcayctccttacctcacaattctagatgt

SEQ ID NO: 2696 - DNA, 51 bp, Homo sapiens
aagaaagcagaaatgctataagttaygagggaaatggccactttgtgtcac

SEQ ID NO: 2697 - DNA, 51 bp, Homo sapiens
tttttacttatattgagtgctttaaraattaagaaacacttttaacagaaa

SEQ ID NO: 2698 - DNA, 51 bp, Homo sapiens
tcacagcagttcaggcgtaaaattayctgcaatttgtgagcaggtcttaga

SEQ ID NO: 2699 - DNA, 51 bp, Homo sapiens
ggtgtttgtgttggctctaaacaaaycagttcttgcaatcctggccagttt

SEQ ID NO: 2700 - DNA, 51 bp, Homo sapiens
ttgacaggtactattctagactgtgsaagtagaacagaccaggtccctgct

SEQ ID NO: 2701 - DNA, 51 bp, Homo sapiens
agataatttgtcattgtttggatatyagctcaagcatcactccctcagaag

SEQ ID NO: 2702 - DNA, 51 bp, Homo sapiens
cacatttttaattttcataaaggccrataagttgtgaataaaaaaggttca

SEQ ID NO: 2703 - DNA, 51 bp, Homo sapiens
ttgttttattatcaggattcctttcyataacatttccaaacagttgaatca

SEQ ID NO: 2704 - DNA, 51 bp, Homo sapiens
ccattaatgatgattgacatcaataraaacattagcttgcacctccagttc

SEQ ID NO: 2705 - DNA, 51 bp, Homo sapiens
ttggctatagtattcccacttttaawcaaatgtcaattaaggtgcaggtta

SEQ ID NO: 2706 - DNA, 51 bp, Homo sapiens
ttcaggaaacaaatatatattttcaygttaaaaagggcttaaatgaaacca

SEQ ID NO: 2707 - DNA, 51 bp, Homo sapiens
atctgtgatactacatctatggtcayctacggagtgtcagatcctggttta

SEQ ID NO: 2708 - DNA, 51 bp, Homo sapiens
gcaactgaatgtaggtggattgtctsaaacccattaccgttgtccacccac

SEQ ID NO: 2709 - DNA, 51 bp, Homo sapiens
ttttttttttgagttagggttgatayagtttagatatgtgtcctcacccaa

SEQ ID NO: 2710 - DNA, 51 bp, Homo sapiens
ttattaaaaatttaattatattaacygacaaattatattaaaacacagata

SEQ ID NO: 2711 - DNA, 51 bp, Homo sapiens
tcaagcacttatccatgaattgtccracagtggctgggcaagtttcggatt

SEQ ID NO: 2712 - DNA, 51 bp, Homo sapiens
aaagctatgtgttcgcatggatgacmattagtaaaaaaaaaatactgtgtc

SEQ ID NO: 2713 - DNA, 51 bp, Homo sapiens
ctctgcacttttcattaagtacttasgattagccagtaccccttctacctg

SEQ ID NO: 2714 - DNA, 51 bp, Homo sapiens
tcgtatacctttcctttgtgtaagargagaaaaagaacaaaagaaaaaggt

SEQ ID NO: 2715 - DNA, 51 bp, Homo sapiens
gtgttctaatctgacacaaattgtamtaatctattcttagagaaatttgta

SEQ ID NO: 2716 - DNA, 51 bp, Homo sapiens
acagtagaaaaatgggcaagagttaygaagaaatcaacaagtgaaattcta

SEQ ID NO: 2717 - DNA, 51 bp, Homo sapiens
tcaataagaatatgtagagtcaacayagtagaaaaatgggcaagagttacg

SEQ ID NO: 2718 - DNA, 51 bp, Homo sapiens
gaataatattttctgataatgccccrgtttggcttcctgggagtggctcct

SEQ ID NO: 2719 - DNA, 51 bp, Homo sapiens
ttcacacagggaaagagaggaggcayattgtactcactggtacatagcaat

SEQ ID NO: 2720 - DNA, 51 bp, Homo sapiens
aacatttctctgtgtggataagataraaattcaatgtgtattctctgtgaa

SEQ ID NO: 2721 - DNA, 51 bp, Homo sapiens
aaaaattcatactttactagtgggckattattggaatatgaagcatttcag

SEQ ID NO: 2722 - DNA, 51 bp, Homo sapiens
ttcatagtttgttaggagcactaaaygaatagtagaaagcctgccagaaag

SEQ ID NO: 2723 - DNA, 51 bp, Homo sapiens
ctgactcacttgaatatgaactttgyatcaaaatggtaaggcctcatttcg

SEQ ID NO: 2724 - DNA, 51 bp, Homo sapiens
ctgttccatctctctcaatggaaaasttgtcattttataatcacagtattt

SEQ ID NO: 2725 - DNA, 51 bp, Homo sapiens
ggcagagggaatagtctgagatgaayagataaagatgttccaaaatacgaa

SEQ ID NO: 2726 - DNA, 51 bp, Homo sapiens
gtattaatataagctgtatattttcycagttatcatgttgcaagagctgta

SEQ ID NO: 2727 - DNA, 51 bp, Homo sapiens
tagtcacagcaaattggatgttgcaygtataagacctacaggaggcggaag

SEQ ID NO: 2728 - DNA, 51 bp, Homo sapiens
ttcttaaaatctgaattaagccacaygaatgatagtcactttcacaatcag

SEQ ID NO: 2729 - DNA, 51 bp, Homo sapiens
agtccccaggggcttggcggttgagraaattgcagcaaaattgctgtccag

SEQ ID NO: 2730 - DNA, 51 bp, Homo sapiens
tcttcactggatggagattacccaayggtcagatcataaactcagcaatca

SEQ ID NO: 2731 - DNA, 51 bp, Homo sapiens
atcatattaattgaattgcttaatawataatcttcaaatacttggctaatt

SEQ ID NO: 2732 - DNA, 51 bp, Homo sapiens
tgcaaaaaaaattgcttggtagatayccaaaatatttctacataataaaag

SEQ ID NO: 2733 - DNA, 51 bp, Homo sapiens
gcagagaggacttctagagtacgcgrattgcatatcgtcaggcgaatagta

SEQ ID NO: 2734 - DNA, 51 bp, Homo sapiens
gggagtctatcaccactgctacttayatcgaatgctttacacaagtttcaa

SEQ ID NO: 2735 - DNA, 51 bp, Homo sapiens
gaagcacaggagttaagatcagagamcacatttttcctggcaccagactgt

SEQ ID NO: 2736 - DNA, 51 bp, Homo sapiens
atgtccgaggcccgagtgaatagtgsaagtctcagaaggggatgttactga

SEQ ID NO: 2737 - DNA, 51 bp, Homo sapiens
tgctatgtagcatggaggactttgakgagaaccaacggagtgttcagtgag

SEQ ID NO: 2738 - DNA, 51 bp, Homo sapiens
tctcatcctacatttaaaatcacaaygctttgttctgaaactatgactgaa

SEQ ID NO: 2739 - DNA, 51 bp, Homo sapiens
tttatttggaatgcaatcagtatctraagaatggcctacaagggctttgag

SEQ ID NO: 2740 - DNA, 51 bp, Homo sapiens
ttagcctgatagtctaaatagaatartagtattccagcataatagtctaag

SEQ ID NO: 2741 - DNA, 51 bp, Homo sapiens
ccttaaaaactgtgggaaagaattaygggaaaagtgactatagagagctag

SEQ ID NO: 2742 - DNA, 51 bp, Homo sapiens
ctatttctaccttaacattaaaaaarttgatgtatttcgtctgagtgcaat

SEQ ID NO: 2743 - DNA, 51 bp, Homo sapiens
gggtcaaagctagagagaagagataygactatggaaacaggttgaaatgat

SEQ ID NO: 2744 - DNA, 51 bp, Homo sapiens
aaaatgagttgtgtacattaatagcyaggaaaagattaaaattgaaaagat

SEQ ID NO: 2745 - DNA, 51 bp, Homo sapiens
gaagagttatgactttccaaaattcrtctcaaattaaggtgtaaacaaaac

SEQ ID NO: 2746 - DNA, 51 bp, Homo sapiens
gggcctgtgtatccatgctttttccratggaatcaaatatataaactgctc

SEQ ID NO: 2747 - DNA, 51 bp, Homo sapiens
acaaggtcttacaattgtgcaatacrgcaatccagatcaggcatgaaaatt

SEQ ID NO: 2748 - DNA, 51 bp, Homo sapiens
cctgttatactacttgtgtaatttgwatctctgagcataaaagctggcact

SEQ ID NO: 2749 - DNA, 51 bp, Homo sapiens
ggagagtcaaaatctatgagataaayatagatttccatgtcttgggtgtca

SEQ ID NO: 2750 - DNA, 51 bp, Homo sapiens
tggtactgcacctgaattttcgtacygagtccaagattcaataaactgtcc

SEQ ID NO: 2751 - DNA, 51 bp, Homo sapiens
atctacctaaacaggctatttaaatkaccagaatgcactaagctttgagca

SEQ ID NO: 2752 - DNA, 51 bp, Homo sapiens
cctgtttaggtagatggaatctctgsaataaaaatgctcttagcctctgct

SEQ ID NO: 2753 - DNA, 51 bp, Homo sapiens
atttttttaagacttgctgcatatcsaaggattaggttccgtgggctctca

SEQ ID NO: 2754 - DNA, 51 bp, Homo sapiens
aacattttcagagcttttccatgtaygagatgcttttttgatacatgactt

SEQ ID NO: 2755 - DNA, 51 bp, Homo sapiens
cagtaacagaaagatatatgggaaaycgctaagtcaaaccacatacttaac

SEQ ID NO: 2756 - DNA, 51 bp, Homo sapiens
agggcaaggccgtgcatcagaacagstggatccaagtattcaacagcttca

SEQ ID NO: 2757 - DNA, 51 bp, Homo sapiens
gttgaccagtctctaattagctagtwaatgtatctggcaggtttaccaaaa

SEQ ID NO: 2758 - DNA, 51 bp, Homo sapiens
tggtgggaagtttaataaacactctsaagctattaaaaggtttctctacga

SEQ ID NO: 2759 - DNA, 51 bp, Homo sapiens
ctgaagctattaaaaggtttctctaygatttctaaaaaccatgcctaaata

SEQ ID NO: 2760 - DNA, 51 bp, Homo sapiens
tagtgggttggagcagtaatggtgaygaattcttctctgcttaggttgtgc

SEQ ID NO: 2761 - DNA, 51 bp, Homo sapiens
taaagcttgcctaaaattgtgcaacwaccaaaggtcaaagctgagatttta

SEQ ID NO: 2762 - DNA, 51 bp, Homo sapiens
aggaatgcagcttgaccttagaatgratttgatccaggaactagaaggtgg

SEQ ID NO: 2763 - DNA, 51 bp, Homo sapiens
ttttgttctagaaattttcatttcaycagcgtataaaatttcacaagcagt

SEQ ID NO: 2764 - DNA, 51 bp, Homo sapiens
acatttcaaatggcagtgatcaataygggacttccccagctgtttgaaata

SEQ ID NO: 2765 - DNA, 51 bp, Homo sapiens
tgggctaggacaaaggaagtgagaaygaaaatagtggtaaatttgagcaat

SEQ ID NO: 2766 - DNA, 51 bp, Homo sapiens
cccatgatgtctctgctgtgagtaayggttatcgaatttttggaagttaag

SEQ ID NO: 2767 - DNA, 51 bp, Homo sapiens
tctctatttctgggtctccaggatakaacacaatactcagcgtgtagtaat

SEQ ID NO: 2768 - DNA, 51 bp, Homo sapiens
tagattcttcactctcaccttacttkcataggcactttatatttcttagat

SEQ ID NO: 2769 - DNA, 51 bp, Homo sapiens
tggcttccttgtccttgcatagggargaacacaggcagacgtggtaggaga

SEQ ID NO: 2770 - DNA, 51 bp, Homo sapiens
attcgtatgttcagtaaagttgaagwaacccagctctgaagacactaaatg

SEQ ID NO: 2771 - DNA, 51 bp, Homo sapiens
ggtgggaaaacagtggttgcctggawcaacggcaaacgctccggccagtgg

SEQ ID NO: 2772 - DNA, 51 bp, Homo sapiens
ctaaacataaggctttttagactcaytaaaggaaatagcaaaattcttaac

SEQ ID NO: 2773 - DNA, 51 bp, Homo sapiens
ggctagttgataaagtgtatgacggracatgttagcaacatctcattcatg

SEQ ID NO: 2774 - DNA, 51 bp, Homo sapiens
gactgctgtgtggtagtaattctgaygtttgtttttaaaatggatttctgt

SEQ ID NO: 2775 - DNA, 51 bp, Homo sapiens
accaaggaggcaaagaagtgggaacyatggccgggtgtgatggctcatgcc

SEQ ID NO: 2776 - DNA, 51 bp, Homo sapiens
caacatttttctaactctgaggtttragcactctgcttttagctgtattct

SEQ ID NO: 2777 - DNA, 51 bp, Homo sapiens
gccagtaccatactgttttggttaaygtactcttatattctagtttgaatt

SEQ ID NO: 2778 - DNA, 51 bp, Homo sapiens
tcatttgtctgctgattagtttagarcatttgttgtactgtaattgcaggg

SEQ ID NO: 2779 - DNA, 51 bp, Homo sapiens
atatgtataacgaaagctatatcaawggaaccattctctagctgtgagaat

SEQ ID NO: 2780 - DNA, 51 bp, Homo sapiens
tctgaatagctctcaggaatttttcyatactcttataatgattatcacatt

SEQ ID NO: 2781 - DNA, 51 bp, Homo sapiens
catccagccaacatgtagcgattcaytcaacccttgttgagcccctaccat

SEQ ID NO: 2782 - DNA, 51 bp, Homo sapiens
atagtcaatttttagctcactttagraatataaatgatacaactgagaata

SEQ ID NO: 2783 - DNA, 51 bp, Homo sapiens
aagtgtgaagctattaaaattgttaygcatctagtgacgtggaaagataaa

SEQ ID NO: 2784 - DNA, 51 bp, Homo sapiens
catcttcattcctgctccttaaaacmattatcaccaccagaaactacccag

SEQ ID NO: 2785 - DNA, 51 bp, Homo sapiens
gaccaccccatctcactctctaaaaygctggcaatgccctcagttctaaac

SEQ ID NO: 2786 - DNA, 51 bp, Homo sapiens
attggcaatatacagcaataaaggayggtactccattaactagaactcccc

SEQ ID NO: 2787 - DNA, 51 bp, Homo sapiens
gtaaggttcatcttcatgaagttaawctatgtctcacacttctgtccagta

SEQ ID NO: 2788 - DNA, 51 bp, Homo sapiens
cagaaaatatgttaagtaattccaakgggcacaattttctagaatgcaatg

SEQ ID NO: 2789 - DNA, 51 bp, Homo sapiens
gacggagttgggctaatgctgtaggyatccgtagaaatctatatctatatc

SEQ ID NO: 2790 - DNA, 51 bp, Homo sapiens
ataaaattaaatgaagtggtctaaasttacccatgatgagttaaaggaaag

SEQ ID NO: 2791 - DNA, 51 bp, Homo sapiens
gaagcagctctttccatatgagctcrctttttcagaaaacctatccagtca

SEQ ID NO: 2792 - DNA, 51 bp, Homo sapiens
ttgccatccaggaactgataatagayttggcaaaaacacaaatgtaaacaa

SEQ ID NO: 2793 - DNA, 51 bp, Homo sapiens
tagtgagagtctcttctttagctggracagaatgacaagaaacaggatgca

SEQ ID NO: 2794 - DNA, 51 bp, Homo sapiens
aaaatttatggtaacattcattcackattatgtaacattgtctgctactgg

SEQ ID NO: 2795 - DNA, 51 bp, Homo sapiens
ttaacagtttggagggtttcagaacyagacacaaagataagaggaaaatct

SEQ ID NO: 2796 - DNA, 51 bp, Homo sapiens
tcttagcgttctatgtctcctgttcraaaactgcatattattttgatatta

SEQ ID NO: 2797 - DNA, 51 bp, Homo sapiens
agagagctacaagaagagactgccaytcttattctggatagtctagagttg

SEQ ID NO: 2798 - DNA, 51 bp, Homo sapiens
acaaatatgcatgaatatagaggcarcctgaatagtaggtatattttggat

SEQ ID NO: 2799 - DNA, 51 bp, Homo sapiens
gggctccacacagacattcatggaamcaggttgatatgggttacaccatct

SEQ ID NO: 2800 - DNA, 51 bp, Homo sapiens
aattacatggaattttatttcctgaractctaatcatcaagttctcctata

SEQ ID NO: 2801 - DNA, 51 bp, Homo sapiens
aaatattatgctttaggaagtcatasaaaaccatgttaagcttcaaaatgg

SEQ ID NO: 2802 - DNA, 51 bp, Homo sapiens
ctaagtttcagttgtgctcattatargctatattacactaaggagaaatct

SEQ ID NO: 2803 - DNA, 51 bp, Homo sapiens
atacaagtgctttgactcatttattwaaaaaggcttcatgtaaaccttgca

SEQ ID NO: 2804 - DNA, 51 bp, Homo sapiens
taaaaaagcttctgtgaagggataartgattaagatttcatgagttttaat

SEQ ID NO: 2805 - DNA, 51 bp, Homo sapiens
atgaaggtgcattactaattttaaaktggccaggttgactttaagagacag

SEQ ID NO: 2806 - DNA, 51 bp, Homo sapiens
taataaatcttgtagttctacgttaraggacatggactttttaaaggatgt

SEQ ID NO: 2807 - DNA, 51 bp, Homo sapiens
atacaaaacaactttttgtctgaaasctctattgaagtcagtataagattg

SEQ ID NO: 2808 - DNA, 51 bp, Homo sapiens
attatgtcaaagaaaagagacttgtyaagaggtaagagccttggctacaaa

SEQ ID NO: 2809 - DNA, 51 bp, Homo sapiens
cacctttcaccctgtatggctatgayccctagaatggcaaagctttgtata

SEQ ID NO: 2810 - DNA, 51 bp, Homo sapiens
gcaagatttttaaacagggaagtgaycttacttataggaaatgagtcagca

SEQ ID NO: 2811 - DNA, 51 bp, Homo sapiens
gaatacaaggttagctcgcttgcctyagatagggtagactgtaatctgtat

SEQ ID NO: 2812 - DNA, 51 bp, Homo sapiens
agtgtaggacatagaaaaagtgagtyagtgagacatatttgagcgttttcc

SEQ ID NO: 2813 - DNA, 51 bp, Homo sapiens
catctcagttgacttttaatgggaargcctaatattagaccacttacagga

SEQ ID NO: 2814 - DNA, 51 bp, Homo sapiens
gtgatgaagtgtcttttctgtaagcrgatacctacaaagaattatattact

SEQ ID NO: 2815 - DNA, 51 bp, Homo sapiens
aatgatattgtctgatgccttctcayaattcaattcttctagatcctatca

SEQ ID NO: 2816 - DNA, 51 bp, Homo sapiens
ttagtccttgagcctaccatatctayggcaaaatattattaaattacttac

SEQ ID NO: 2817 - DNA, 51 bp, Homo sapiens
atcaataagtgcaataggtgaagaaygacttttatgttctagacatgctga

SEQ ID NO: 2818 - DNA, 51 bp, Homo sapiens
atcagagctcttgaatgaccaggtaygctgtcaatgagcagtaatattttg

SEQ ID NO: 2819 - DNA, 51 bp, Homo sapiens
ctatagtaaaatagtaaaatagaacraccataacaaataccatcctcatta

SEQ ID NO: 2820 - DNA, 51 bp, Homo sapiens
accttcaaagaacacaagaaaacaargaatagagttttataaagaaataat

SEQ ID NO: 2821 - DNA, 51 bp, Homo sapiens
catagcatataccctctatctacatyatctttctcacacatccccataggt

SEQ ID NO: 2822 - DNA, 51 bp, Homo sapiens
ttcttcaagtattgaggaaagaaaartgactttgggccaggcatggtggct

SEQ ID NO: 2823 - DNA, 51 bp, Homo sapiens
ctgctgtgaatctattacctgtaacyggtccttgtctcctctaagcctgtt

SEQ ID NO: 2824 - DNA, 51 bp, Homo sapiens
atacacagcctaacagtgaggaacaktcagatcgtctctaatatcataggc

SEQ ID NO: 2825 - DNA, 51 bp, Homo sapiens
aagtagttgcctgaagtataatctargtatgagtagaaactttcagttgtt

SEQ ID NO: 2826 - DNA, 51 bp, Homo sapiens
gagctaaggtattgatgactcttaakggcttaatgttatccttctttgttg

SEQ ID NO: 2827 - DNA, 51 bp, Homo sapiens
agcagcatggaaaagtgagctccaakaagtagcagagattggcaggagcct

SEQ ID NO: 2828 - DNA, 51 bp, Homo sapiens
tagttttggtagtaaaatcaactccraagtattagataccattttaaaaag

SEQ ID NO: 2829 - DNA, 51 bp, Homo sapiens
tggggccagcgagcaggctaaagaamgaaaatgagcggaatagtcagacgc

SEQ ID NO: 2830 - DNA, 51 bp, Homo sapiens
gcacatctaaaacaagataaagagasgtgaaaaataaagggatggaaaaga

SEQ ID NO: 2831 - DNA, 51 bp, Homo sapiens
cccaccaacagtgtaaaagtgaagcrattattaatgccattatatctgaaa

SEQ ID NO: 2832 - DNA, 51 bp, Homo sapiens
gtctggaagaggtaaagggaaaagcrgcagtctctggaggatgtgtgtaat

SEQ ID NO: 2833 - DNA, 51 bp, Homo sapiens
cctttgactcccggaggtattagcasagtatcttgctgtgtacctcattag

SEQ ID NO: 2834 - DNA, 51 bp, Homo sapiens
caaatcaaaatctgtaatcttcttakagagacataactttgggtatataca

SEQ ID NO: 2835 - DNA, 51 bp, Homo sapiens
ctttgtggaagaagtggtatctacaytgggtctgaaaggatatgagacaca

SEQ ID NO: 2836 - DNA, 51 bp, Homo sapiens
gaaaatgacacttcccatagtgtcaraattgtggtctattggagaattctg

SEQ ID NO: 2837 - DNA, 51 bp, Homo sapiens
atgacctcataaaaattattgaaaasaaattactaggaaaggacagtaagg

SEQ ID NO: 2838 - DNA, 51 bp, Homo sapiens
tataaaacggagaaattggaaaaaamtgttattcagaaaaaaactttcttg

SEQ ID NO: 2839 - DNA, 51 bp, Homo sapiens
attgtgttagcaagtcttgccctgartacgttccttaatgacctatgttgc

SEQ ID NO: 2840 - DNA, 51 bp, Homo sapiens
attcagggcaagacttgctaacacartaaagctcactatgtgccaggaact

SEQ ID NO: 2841 - DNA, 51 bp, Homo sapiens
gtatgtcacacaatacacatctacaygcaaagcccagatgggtgaagttgt

SEQ ID NO: 2842 - DNA, 51 bp, Homo sapiens
ccctcaggaaagtctagtctaataawtacgcagccacctgtaacatgaaac

SEQ ID NO: 2843 - DNA, 51 bp, Homo sapiens
ttttgcataaggtgtaaggtttaggwcaagatttataatttgcctatgatg

SEQ ID NO: 2844 - DNA, 51 bp, Homo sapiens
atcatacgtcacagcttggaaatcayagacaaaaactgactcttacaaaag

SEQ ID NO: 2845 - DNA, 51 bp, Homo sapiens
catttggagatgaggatgtggggtcmcaaaagtagcaaagtgcagagctca

SEQ ID NO: 2846 - DNA, 51 bp, Homo sapiens
cactgccccgtctaatacacaccagyatgattcttaatccccacagtcatt

SEQ ID NO: 2847 - DNA, 51 bp, Homo sapiens
tctctggcccctggccctttaaatgycactatacactgccttctagagatg

SEQ ID NO: 2848 - DNA, 51 bp, Homo sapiens
gtgggcaatcagctaaatgggcaaayggagcgagcagacgtctcatacaat

SEQ ID NO: 2849 - DNA, 51 bp, Homo sapiens
tcaaactcagtggcatacaatcctgsagtcctggagacccagagctactgg

SEQ ID NO: 2850 - DNA, 51 bp, Homo sapiens
ataagagataaaggagaattcaagartagacagtggagacctaagccaacc

SEQ ID NO: 2851 - DNA, 51 bp, Homo sapiens
accctagtcccattccagctctccartaagcaagagtcttgcaaatgacag

SEQ ID NO: 2852 - DNA, 51 bp, Homo sapiens
gaatactgatgtatttagattgttayatgctattcttaaaatgctttagaa

SEQ ID NO: 2853 - DNA, 51 bp, Homo sapiens
acacatcccgccacctgacccaagamggcaaatcagattttctctcttatg

SEQ ID NO: 2854 - DNA, 51 bp, Homo sapiens
acataagatttcacgctgattattcwtcctacgttgtatacctgccaagta

SEQ ID NO: 2855 - DNA, 51 bp, Homo sapiens
taggaaggggttgtcgttaatctacyagagtgatgagaagtagaaagaaag

SEQ ID NO: 2856 - DNA, 51 bp, Homo sapiens
tacaacatcaggaatggtttggaaarttgaattacaaagcaccctgcatta

SEQ ID NO: 2857 - DNA, 51 bp, Homo sapiens
aagcagtacaatgaatgagcttatayagttatttcatcagaaataggcaca

SEQ ID NO: 2858 - DNA, 51 bp, Homo sapiens
aaatatgttatagaagaaaaattcaraatatactcatcagtttttttaatc

SEQ ID NO: 2859 - DNA, 51 bp, Homo sapiens
aaccgattggttcactagaggcaacrgaatccatgagaccatagcaaacac

SEQ ID NO: 2860 - DNA, 51 bp, Homo sapiens
tgtggctattgggtttcaactttagmatttatggaagaatcaatgtttgaa

SEQ ID NO: 2861 - DNA, 51 bp, Homo sapiens
tagtacactattgactatgggagtayatcacaggaaaatagggcttagtat

SEQ ID NO: 2862 - DNA, 51 bp, Homo sapiens
aaaaaacagccatttatactaagccraatctctgagatctttctgaaaata

SEQ ID NO: 2863 - DNA, 51 bp, Homo sapiens
ttgataagttttgatggtgaacctaygagaaaagatacagattagtattaa

SEQ ID NO: 2864 - DNA, 51 bp, Homo sapiens
ttaagaatagagtttccatttaaaarcaccaaggcagttgtcagaacaggg

SEQ ID NO: 2865 - DNA, 51 bp, Homo sapiens
aggccaagagcaacaatttcaggtargcaccctccatgaatggctgccaac

SEQ ID NO: 2866 - DNA, 51 bp, Homo sapiens
ttgacagactttatctttgaaaatgycctcagctgtgccaaaaagaataag

SEQ ID NO: 2867 - DNA, 51 bp, Homo sapiens
agaggagaaggaacgagcaatgagayagataatataaactgtgagtgctgt

SEQ ID NO: 2868 - DNA, 51 bp, Homo sapiens
atgcagtagcccaaaccatggggtcmaattatgcagatatttaaatcttcc

SEQ ID NO: 2869 - DNA, 51 bp, Homo sapiens
gatgtgaagaaatggaacccttgcayagtgttagtgggcatgcaaaactgt

SEQ ID NO: 2870 - DNA, 51 bp, Homo sapiens
atttccctccactgaacttagaaaakactcttcaaaagataatggtgttat

SEQ ID NO: 2871 - DNA, 51 bp, Homo sapiens
ctcagtcactgacaacatattgaaawcaggtaacctgccaaagcttcatta

SEQ ID NO: 2872 - DNA, 51 bp, Homo sapiens
actccatactggagagaaacttttcraatgtaaagaatgtggcaaggcctt

SEQ ID NO: 2873 - DNA, 51 bp, Homo sapiens
gctctaaaaaatatttttatataaaygattagtacactttgagtctgagta

SEQ ID NO: 2874 - DNA, 51 bp, Homo sapiens
gaagagacatcaataccaaggataayctctgcctgacttaaattctacctc

SEQ ID NO: 2875 - DNA, 51 bp, Homo sapiens
gcaacagcactgtttccaaatgtgaygttattacagagatgtcatacaaaa

SEQ ID NO: 2876 - DNA, 51 bp, Homo sapiens
ccctgaaggtcaagtagccttcccaygtatttatagcctgggtttatgtcc

SEQ ID NO: 2877 - DNA, 51 bp, Homo sapiens
ttatgatatataaaatccataaaagragagagtcatgcttaaaattatgca

SEQ ID NO: 2878 - DNA, 51 bp, Homo sapiens
tttaggtgtaacactctaggaagtakgagttttaatgcttccttgattttt

SEQ ID NO: 2879 - DNA, 51 bp, Homo sapiens
atttttaattctatccaaaacaagcyattagaatgacatcaagtgtttgag

SEQ ID NO: 2880 - DNA, 51 bp, Homo sapiens
aggactggctttccctatccttgaamaatgatagcatgactttgtattgct

SEQ ID NO: 2881 - DNA, 51 bp, Homo sapiens
atccttctccaagaacctgggtcagsaaaaattgtaatactcagagaactt

SEQ ID NO: 2882 - DNA, 51 bp, Homo sapiens
acctttggctatgtctgattctcctsactgtgtaagtatatggtatacact

SEQ ID NO: 2883 - DNA, 51 bp, Homo sapiens
tataagaggaagtcactatcagatamataagttaaaaatgtataatttttc

SEQ ID NO: 2884 - DNA, 51 bp, Homo sapiens
aactaaatagccccaagaaaacattsaagcctcttaatttttgtttatttt

SEQ ID NO: 2885 - DNA, 51 bp, Homo sapiens
ctcttagatccattttagagacaagwcatggacatcctggtggactaagtg

SEQ ID NO: 2886 - DNA, 51 bp, Homo sapiens
gcaggtttgggctacccagaaacagktggcatctttggtagtgtcaagcct

SEQ ID NO: 2887 - DNA, 51 bp, Homo sapiens
acttactgtcaaatagtatcaaataygcttcattgcaggtaaatattttat

SEQ ID NO: 2888 - DNA, 51 bp, Homo sapiens
ggattctgtttttattttagcatgaycctaaaactgccaacaaaatatcat

SEQ ID NO: 2889 - DNA, 51 bp, Homo sapiens
ctacctttggactctgtgtctgaaaygcaaatgttaaaaatttaatggtac

SEQ ID NO: 2890 - DNA, 51 bp, Homo sapiens
cttcctgtccacattgcatttgtaakaatgaaacttgcgtgagttgcacgg

SEQ ID NO: 2891 - DNA, 51 bp, Homo sapiens
tgagaacttattttatgactactgasatgggatcagaattgaatttgctaa

SEQ ID NO: 2892 - DNA, 51 bp, Homo sapiens
atcctctaaaaaatcacaaaatacartatgaattcacagttaagcttccat

SEQ ID NO: 2893 - DNA, 51 bp, Homo sapiens
ctaaggaagcttattaaatataggcrgaatttataatgattgtcttagaga

SEQ ID NO: 2894 - DNA, 51 bp, Homo sapiens
aggtgaagggaaatggaatcactaasagaatgctcctaatggctaaaataa

SEQ ID NO: 2895 - DNA, 51 bp, Homo sapiens
cagcaagaggaccggtgtgactggakcgaagtaagctggaagctacattaa

SEQ ID NO: 2896 - DNA, 51 bp, Homo sapiens
tcatttttagattaacttacgtctcwcttctcttacacaaaaacctcagga

SEQ ID NO: 2897 - DNA, 51 bp, Homo sapiens
agctattttacagcagaagtacacargcaaaggagttaataattccccatt

SEQ ID NO: 2898 - DNA, 51 bp, Homo sapiens
atttggacagaaagctcttggcacarcagtgatacctaaggataaattata

SEQ ID NO: 2899 - DNA, 51 bp, Homo sapiens
tcaagtctaggtctgtatacttcacratcttttcttcttcaagttttacaa

SEQ ID NO: 2900 - DNA, 51 bp, Homo sapiens
tatacattctacgtaaagacccacargtttatctggctgtaaataaaattt

SEQ ID NO: 2901 - DNA, 51 bp, Homo sapiens
ttgtcaacaatcatagacagtatacrcggaaagaaaaagccagtaattttg

SEQ ID NO: 2902 - DNA, 51 bp, Homo sapiens
ggtatgcagggctagtattctcgaarccaattttacatatgactagcagct

SEQ ID NO: 2903 - DNA, 51 bp, Homo sapiens
gaatctatcattgctaaatattcaaraaggctataaattttaaagtaatat

SEQ ID NO: 2904 - DNA, 51 bp, Homo sapiens
cattttaaacataactcttctccacmgaacttgggtgtttcacaatcttgc

SEQ ID NO: 2905 - DNA, 51 bp, Homo sapiens
gaattttgatatactgtattttcacygcaattttctaaataatatataacg

SEQ ID NO: 2906 - DNA, 51 bp, Homo sapiens
ctgtacctcttttttaacattaaagyaagagtgttccaagactcctcaatc

SEQ ID NO: 2907 - DNA, 51 bp, Homo sapiens
gaccacttacttgtgctaaaccccaygagaggtgttgtatgcacaccaaag

SEQ ID NO: 2908 - DNA, 51 bp, Homo sapiens
gtgcattagaagtttagcaatatttmtgactgcctggtagatgtcagtaac

SEQ ID NO: 2909 - DNA, 51 bp, Homo sapiens
agagtgagcgaaaatgtggtagcaartattgcagagctctatccatgggga

SEQ ID NO: 2910 - DNA, 51 bp, Homo sapiens
acctaatcgcagctaactttattgtrtacaaactcataatgtgctaggcag

SEQ ID NO: 2911 - DNA, 51 bp, Homo sapiens
cccagaaagaaaaatgcacctcttcracattgatctgtttttggagtttaa

SEQ ID NO: 2912 - DNA, 51 bp, Homo sapiens
ggtcaggtgttttcctcccaggagartgtgtatttttaaagcgccaagaaa

SEQ ID NO: 2913 - DNA, 51 bp, Homo sapiens
aacaaggtatttacctccagtgagamcaaaagccgtaaagcagtaattaaa

SEQ ID NO: 2914 - DNA, 51 bp, Homo sapiens
gcataatttttgtgtttttttctgcrgtgattcagcaattactacattgct

SEQ ID NO: 2915 - DNA, 51 bp, Homo sapiens
ctttggggagccattcccaacaagtytggctacgagtcccccactttccag

SEQ ID NO: 2916 - DNA, 51 bp, Homo sapiens
gttccaggaaaccccagggcctcccracatgtggtcttttctgctccaggg

SEQ ID NO: 2917 - DNA, 51 bp, Homo sapiens
agattatttaactgtgaacccataawtgtcaaaatctaaaatgtaataact

SEQ ID NO: 2918 - DNA, 51 bp, Homo sapiens
tttggacaactggcaaagagtttgargttagaaaaattagtgatcatacac

SEQ ID NO: 2919 - DNA, 51 bp, Homo sapiens
ggctgaaagaccacgtggagatagamgggcccagcatcacagctactcagt

SEQ ID NO: 2920 - DNA, 51 bp, Homo sapiens
agaggataagtgctgtgaatgatgakattaactgtattttggaggtcaagt

SEQ ID NO: 2921 - DNA, 51 bp, Homo sapiens
tcttctcacttcccctttgttagaaytgtcctcttctctgcagatccttgc

SEQ ID NO: 2922 - DNA, 51 bp, Homo sapiens
gatcttgtcttgaaggatggatagaygttcaacagaggaagcctatggctt

SEQ ID NO: 2923 - DNA, 51 bp, Homo sapiens
gttggttgaatgaatgaatgagtgamtaaatgcttgatatgagacaatccc

SEQ ID NO: 2924 - DNA, 51 bp, Homo sapiens
ggtttctcaagaatatgaagtgctcratgtaatttagagcaatctgcacag

SEQ ID NO: 2925 - DNA, 51 bp, Homo sapiens
caatctctgcggtgctgagctgtccygcgtgtggtgatttgttgggcagcc

SEQ ID NO: 2926 - DNA, 51 bp, Homo sapiens
taattctgtcagaaatgtacgtggcyattagttaaccttacaagcactctt

SEQ ID NO: 2927 - DNA, 51 bp, Homo sapiens
ttaaaagagcactttttatgagaaaygtggcccttaatgtcagaaatcatt

SEQ ID NO: 2928 - DNA, 51 bp, Homo sapiens
ctgcatctcctggaagattattagckccctacgttctcaaacctcttctgc

SEQ ID NO: 2929 - DNA, 51 bp, Homo sapiens
ggtcatttgtaatattttgtgataaygtatgtggaagactttaaaactagt

SEQ ID NO: 2930 - DNA, 51 bp, Homo sapiens
tgttcaatactgtcaaaacttttgcyctgcttaataaagattttccactag

SEQ ID NO: 2931 - DNA, 51 bp, Homo sapiens
actagattaagatgagcacctatcaytctattggcctttttaaggtaagac

SEQ ID NO: 2932 - DNA, 51 bp, Homo sapiens
gtaaacaaatcccattattttgacawctcttttagttattgacagcctatt

SEQ ID NO: 2933 - DNA, 51 bp, Homo sapiens
aggaaatagtgtttgttaaaatgcaygtgtacagttttctaaagaaaagtt

SEQ ID NO: 2934 - DNA, 51 bp, Homo sapiens
agctcccttaaagtgaaatttcctaytacctgcttttctgcttgtaaggag

SEQ ID NO: 2935 - DNA, 51 bp, Homo sapiens
gaaaactgaagtggagtgtgtgtacyatagcagagagcgaaggtccctctt

SEQ ID NO: 2936 - DNA, 51 bp, Homo sapiens
aggtgaaaattagttactaaggtaaktaagcatgatttaaagcaaaagaaa

SEQ ID NO: 2937 - DNA, 51 bp, Homo sapiens
tggctatccaagttcccatttaaatsaagaaggagcaccatggtctaatcc

SEQ ID NO: 2938 - DNA, 51 bp, Homo sapiens
cggggctggtggcctcgagtgtaaarttcaggtaggaaatagcaaacatgg

SEQ ID NO: 2939 - DNA, 51 bp, Homo sapiens
gtgtgtgtgtttgaattagtggtatsagaggctctattgactttaattttg

SEQ ID NO: 2940 - DNA, 51 bp, Homo sapiens
attcatctttcacctccaattcctasaccaactacatagaatacgggagtt

SEQ ID NO: 2941 - DNA, 51 bp, Homo sapiens
aacgtggtctagaatttttcacaaarctgaatggtattcatctttcacctc

SEQ ID NO: 2942 - DNA, 51 bp, Homo sapiens
ttattgtatttcctttcctatgaagrattattacagtttctactagtcttt

SEQ ID NO: 2943 - DNA, 51 bp, Homo sapiens
gagtgtccagttgaaagagccagctycacaaccagacacacccaagttcca

SEQ ID NO: 2944 - DNA, 51 bp, Homo sapiens
atatgttataaacgtcaacataagakaagtagtttggggtgcattttctga

SEQ ID NO: 2945 - DNA, 51 bp, Homo sapiens
gcatggaaaaaatccacaggaattaycaaagctgattgtctctgagattta

SEQ ID NO: 2946 - DNA, 51 bp, Homo sapiens
gccgctctgatatttgcataaacagyatagtatctagcagttgtgccaggg

SEQ ID NO: 2947 - DNA, 51 bp, Homo sapiens
gataccagagcaataaggtataatamgtcaaggaaaaaagaattcccattt

SEQ ID NO: 2948 - DNA, 51 bp, Homo sapiens
cggaaactcagagacggagatattgraactctgcagagggcctcagcctct

SEQ ID NO: 2949 - DNA, 51 bp, Homo sapiens
ggagtgcctgaatgtgtgtaaagggrattgatctatgtgataatgtctgat

SEQ ID NO: 2950 - DNA, 51 bp, Homo sapiens
ccatttactgctatatattaaataartaggcaactgtgaaatgcatctttc

SEQ ID NO: 2951 - DNA, 51 bp, Homo sapiens
aggtcttttatatccataacactcayggttgttttccttctctgcctgaat

SEQ ID NO: 2952 - DNA, 51 bp, Homo sapiens
aggctttatcaatttctatggcataygttctctcatcagggctaatttcaa

SEQ ID NO: 2953 - DNA, 51 bp, Homo sapiens
aaccaatgccttgcctttattattayggctctttctatgaggctggatttt

SEQ ID NO: 2954 - DNA, 51 bp, Homo sapiens
tcctgcattgtattcttttactatgrcagctatgacaaatttggtggctta

SEQ ID NO: 2955 - DNA, 51 bp, Homo sapiens
cacacagaggtgctggctctaatacraatttactacgtggatccttcctac

SEQ ID NO: 2956 - DNA, 33 bp, Homo sapiens
aagtagagtgctttctrtgtacctgctgaggac

SEQ ID NO: 2957 - DNA, 51 bp, Homo sapiens
tttttctaacaaaaatagctctagcytcagtacccgccatgccatagctcc

SEQ ID NO: 2958 - DNA, 51 bp, Homo sapiens
cttcctttttcacctatgtgaggackgtagcattgattgggacttccaaag

SEQ ID NO: 2959 - DNA, 51 bp, Homo sapiens
gggagaaaagccgataagaagtcaaygataactatagccatggccataatt

SEQ ID NO: 2960 - DNA, 51 bp, Homo sapiens
ctgaaaacattttgattcctaagcasctttgagtaccagtttttttccagg

SEQ ID NO: 2961 - DNA, 51 bp, Homo sapiens
gggaaaagatattgaagcagaccatratatgatacctatattggagttagc

SEQ ID NO: 2962 - DNA, 51 bp, Homo sapiens
caaacccttttgcgaactgcgcacaygagggatctaagttgcacgctcctt

SEQ ID NO: 2963 - DNA, 51 bp, Homo sapiens
gaacgtggagtcatcttggaggtcamatgcgtcgtttgcagcacgcaggct

SEQ ID NO: 2964 - DNA, 51 bp, Homo sapiens
gccggatccagagcgctgggattcarcaggagtgccaggagaattcaacac

SEQ ID NO: 2965 - DNA, 51 bp, Homo sapiens
tctgggagggctatccgagtcatacragggcaagaaaatagctcttatcgc

SEQ ID NO: 2966 - DNA, 51 bp, Homo sapiens
gctttaatctaatgagaaaatagtcyatgctggtagtaaccaaaggagttt

SEQ ID NO: 2967 - DNA, 51 bp, Homo sapiens
ttccaaaacgcccttcaaaaggaaargcctctggatcaaataaatattgga

SEQ ID NO: 2968 - DNA, 51 bp, Homo sapiens
ttgttttgcatggtttcagtttgcaygaccattttttactgtcccagacta

SEQ ID NO: 2969 - DNA, 51 bp, Homo sapiens
gaccctgttaagtggatgaaaacaargtgtggattgggagaatggaatata

SEQ ID NO: 2970 - DNA, 51 bp, Homo sapiens
tctcagacaatgcaattgaggcaaakataacattaagtaacttgttcacag

SEQ ID NO: 2971 - DNA, 51 bp, Homo sapiens
tcaaacttcattagagatttaacagkaacagtacagtatagtagaatacat

SEQ ID NO: 2972 - DNA, 51 bp, Homo sapiens
ttgtagtttaagcacatttcatcatmataaaaatggcatgaatgagaaata

SEQ ID NO: 2973 - DNA, 51 bp, Homo sapiens
aaatgtgatttgagcttggtatacawaatcattcataagaattagatgtca

SEQ ID NO: 2974 - DNA, 51 bp, Homo sapiens
gatctcatactttaataaaattggtsaagacttacactaaagttgccaaca

SEQ ID NO: 2975 - DNA, 51 bp, Homo sapiens
tctataggtatggtgacatttgccaytgaatcttacatgtgagccattcat

SEQ ID NO: 2976 - DNA, 51 bp, Homo sapiens
ctaaagacaaaaagatgccaagtcamatcattggataaagcaatatgaaac

SEQ ID NO: 2977 - DNA, 51 bp, Homo sapiens
attaaatttagtttaaaatccttaaktacttcaacaggaaaaaaagtgatt

SEQ ID NO: 2978 - DNA, 51 bp, Homo sapiens
catagtggtgtttattttcgctttargacatagggaagaatcagactcaat

SEQ ID NO: 2979 - DNA, 51 bp, Homo sapiens
tagtaacaaagagcataagcctcagmagtttttatggaactcaaagaagaa

SEQ ID NO: 2980 - DNA, 51 bp, Homo sapiens
cgtaatgatgcaggtacttgaaaaayggagggctgcagggaggtaacaaac

SEQ ID NO: 2981 - DNA, 51 bp, Homo sapiens
aaacagcatagtagtactcatgttgraatcgcaaccagactagagatgtca

SEQ ID NO: 2982 - DNA, 51 bp, Homo sapiens
tggtgaaacaagggctctacacttgsagtctgctaacaaggctgatccatg

SEQ ID NO: 2983 - DNA, 51 bp, Homo sapiens
acaggcctcaaggtgctcctaaaaawtccctgcaaagattcgacaaaaaca

SEQ ID NO: 2984 - DNA, 51 bp, Homo sapiens
acaaccaggccgatagtgtaaaatcractgtctcaccataaaatcttaaag

SEQ ID NO: 2985 - DNA, 51 bp, Homo sapiens
agggacattacagagcacagtaagayccatagtgaaaaaccgaatattcca

SEQ ID NO: 2986 - DNA, 51 bp, Homo sapiens
cataattattatgtagggtctgataycaatttctcttcattagagattgat

SEQ ID NO: 2987 - DNA, 51 bp, Homo sapiens
tgggaggttcctaagagaacgctaarcatgggatcaaaagagtgacacctg

SEQ ID NO: 2988 - DNA, 51 bp, Homo sapiens
taccaggcacattcatgggacatccratacaatctataatttttgtaaatc

SEQ ID NO: 2989 - DNA, 51 bp, Homo sapiens
tggtattgttattctccttgtaaaaycttttaatggctccctatcatgtgg

SEQ ID NO: 2990 - DNA, 51 bp, Homo sapiens
atcacaaatttttcagatggttcaayggttattctattaaatatggagcag

SEQ ID NO: 2991 - DNA, 51 bp, Homo sapiens
agagtctggggactgactgaaaccartgatgagaaaatgctacaaaagcta

SEQ ID NO: 2992 - DNA, 51 bp, Homo sapiens
acagaggtgaatataaatttcagtayctaatgggagagacagatataaaat

SEQ ID NO: 2993 - DNA, 51 bp, Homo sapiens
gccattaaattaactcaaaggggtaraatatgagtctgctctagattgctg

SEQ ID NO: 2994 - DNA, 51 bp, Homo sapiens
tcttgttcaagatgattattttgaasaaaacactgaatttgcatgtcatgt

SEQ ID NO: 2995 - DNA, 51 bp, Homo sapiens
aaagtctgagggaatgaattaaacasgtattttgagcaaattgattactac

SEQ ID NO: 2996 - DNA, 51 bp, Homo sapiens
tgtcctgtttcaagtttaaactatargccagtaagttgtaatttttttcag

SEQ ID NO: 2997 - DNA, 51 bp, Homo sapiens
aaaaagcagcactattataaaatgaygacatattcaatgctgaacaaagac

SEQ ID NO: 2998 - DNA, 51 bp, Homo sapiens
cattagtctatttgtctttatactastaacataacattttgattactgtag

SEQ ID NO: 2999 - DNA, 51 bp, Homo sapiens
atttaaataccataagtacagtgcawactcatatatctataaaataagggc

SEQ ID NO: 3000 - DNA, 51 bp, Homo sapiens
gaagcaaagtctgtaagaaataatayggatagaggtgcagctggagacata

SEQ ID NO: 3001 - DNA, 51 bp, Homo sapiens
acccttttctagatgtatttatgcaraggcaagctcctgctatttgacctc

SEQ ID NO: 3002 - DNA, 51 bp, Homo sapiens
tcaaaaaagtacagcagttagggacrctaggcatatactaagaaacagttc

SEQ ID NO: 3003 - DNA, 51 bp, Homo sapiens
tgataatgaggctgaaagtccataartgaagcctgtattttaaatcaagta

SEQ ID NO: 3004 - DNA, 51 bp, Homo sapiens
ctggtgccctagagtgtctgaactayaatataaaaccatcatgtataactc

SEQ ID NO: 3005 - DNA, 51 bp, Homo sapiens
tctcaaggatataatgataagtaaayagacaggctgacatgctatctatac

SEQ ID NO: 3006 - DNA, 51 bp, Homo sapiens
ccttgggcatctgctagcttcatgayggtcagaccttgaatctttaaacta

SEQ ID NO: 3007 - DNA, 51 bp, Homo sapiens
aactttcctcagctgctgtagtagamacactcataaccctgtctcaagaat

SEQ ID NO: 3008 - DNA, 51 bp, Homo sapiens
aaccctgtaagtattgttattattaygagcattttaaaatatgaagaaata

SEQ ID NO: 3009 - DNA, 51 bp, Homo sapiens
acatgtgcagtggtagtaacactaaratttctcatttggcaaccagcacat

SEQ ID NO: 3010 - DNA, 51 bp, Homo sapiens
agcagaacccttaattatttgaaaascaatttttatatttctgtattctgg

SEQ ID NO: 3011 - DNA, 51 bp, Homo sapiens
agaagaacagtagtagactgtcaaayatgccttggatttaattgggtaccc

SEQ ID NO: 3012 - DNA, 51 bp, Homo sapiens
tacccatctcagtatgtggcatatgrcaagtgagcaataaatgtttgtgga

SEQ ID NO: 3013 - DNA, 51 bp, Homo sapiens
catcacaattctatattccttctacratcaactaaatgtgtattatgatgc

SEQ ID NO: 3014 - DNA, 51 bp, Homo sapiens
tgcagtgggtaacaaatagctacaargcgatcgtaagccatagctgctagc

SEQ ID NO: 3015 - DNA, 51 bp, Homo sapiens
agcccttaagtgtagctttaaggaakgttatagaatttggaagaccagagt

SEQ ID NO: 3016 - DNA, 51 bp, Homo sapiens
tttctcatttgagagataagagaaakaaatttttgttggagtactcttctg

SEQ ID NO: 3017 - DNA, 51 bp, Homo sapiens
caattttaaggtgattaaagtagcaygttcccaatatttttaaatgtgcat

SEQ ID NO: 3018 - DNA, 51 bp, Homo sapiens
aaagtctcttaaaaaccaagtgttayattgtgccatgctgctctgctgcta

SEQ ID NO: 3019 - DNA, 51 bp, Homo sapiens
aatattgtggcaaagccaaggtacaractcacgtgcattaaaatatgctta

SEQ ID NO: 3020 - DNA, 51 bp, Homo sapiens
tgagccaaaagcagtggcaaactgartatcttttgatttgtagtagaattc

SEQ ID NO: 3021 - DNA, 51 bp, Homo sapiens
aaaaaaaaatttttgtttgtgaaaartgaactccattattgtataaggtta

SEQ ID NO: 3022 - DNA, 51 bp, Homo sapiens
tgtttccacatattgctcactttagmattgatggctcagtgggcgaatctg

SEQ ID NO: 3023 - DNA, 51 bp, Homo sapiens
gttccatggccccagtgatgaagtcraactcaaattgcagccagatacatg

SEQ ID NO: 3024 - DNA, 51 bp, Homo sapiens
aagtgctaatgttagagaacaaccaygtgaacaaatgtgaatgatgtgaac

SEQ ID NO: 3025 - DNA, 51 bp, Homo sapiens
tttcaggcattttgagaaatttgcaygtactcaaaagtcttgttacgttcc

SEQ ID NO: 3026 - DNA, 51 bp, Homo sapiens
aaagggggaagatctaactacagtayatgaagatgggtagctccaagaaag

SEQ ID NO: 3027 - DNA, 51 bp, Homo sapiens
gggaaaagtctattacagaatgcaayggagtaggtgttgtataagactata

SEQ ID NO: 3028 - DNA, 51 bp, Homo sapiens
caaaattagaaaatcacaagtgtacrgaattaggaaattataaagtatggc

SEQ ID NO: 3029 - DNA, 51 bp, Homo sapiens
ttatagggtttctgcagagaaatacrctgttaggctgatgggcttgctttt

SEQ ID NO: 3030 - DNA, 51 bp, Homo sapiens
cctatgaacccttctcaatcaaatarcacctctgtgacataaagataaaca

SEQ ID NO: 3031 - DNA, 51 bp, Homo sapiens
ctaataaagagtcaataatctccaayggacgctctgtacatgagcctatcc

SEQ ID NO: 3032 - DNA, 51 bp, Homo sapiens
gcgtatcttttcttcttgatacagcrgagtatttttatactttactattca

SEQ ID NO: 3033 - DNA, 51 bp, Homo sapiens
ccgctgtatcaagaagaaaagatacrcaaggcaggatttgtatgggacata

SEQ ID NO: 3034 - DNA, 51 bp, Homo sapiens
ttctttattggtgttggactagtgcygaaaggttggctataataggaagta

SEQ ID NO: 3035 - DNA, 51 bp, Homo sapiens
gaaaagtgacaggacactagagaagraatatggaaagacatttctgaagta

SEQ ID NO: 3036 - DNA, 51 bp, Homo sapiens
agtattagttaattaaaggtactaargcattttttcatatacagaaacaac

SEQ ID NO: 3037 - DNA, 51 bp, Homo sapiens
attgtgtctgtaactattcccatcaytgagaaaatagtggagaacaaaact

SEQ ID NO: 3038 - DNA, 51 bp, Homo sapiens
tatataatataaattcaggcatcatsaagtatttatgtgtggtctttataa

SEQ ID NO: 3039 - DNA, 51 bp, Homo sapiens
aaacccaaagtgctcaatagctataygttggatgacattgaactgaacact

SEQ ID NO: 3040 - DNA, 51 bp, Homo sapiens
tggtgaaataacggggcaggtaaatraactccaagaatgttaaggtatttc

SEQ ID NO: 3041 - DNA, 51 bp, Homo sapiens
tactcttatgtacttttctatcgtakaaattatgttattgaattaatatgt

SEQ ID NO: 3042 - DNA, 51 bp, Homo sapiens
gaacaaattactggaatttaagcaaygtgaaatctcatcactttagcaatg

SEQ ID NO: 3043 - DNA, 51 bp, Homo sapiens
gcccttaggaacaaagtttagtatgyaatgagtgacgagctctataatatt

SEQ ID NO: 3044 - DNA, 51 bp, Homo sapiens
atgtgtgtgtgtcctatgtacatcawtatgaagattccaagagaatttatt

SEQ ID NO: 3045 - DNA, 51 bp, Homo sapiens
aagtcagtaaatactaaaagtgatayaataacagctcatatttaggattac

SEQ ID NO: 3046 - DNA, 51 bp, Homo sapiens
atctgtaagagagaatgttcctgacmaaaatcagccagaagcccctctcca

SEQ ID NO: 3047 - DNA, 51 bp, Homo sapiens
ttctgcccagcctgtctgacagctcrcaaggttggtgttgcaggcatatgt

SEQ ID NO: 3048 - DNA, 51 bp, Homo sapiens
aatatcccatctagtaatattttgarctgcgtataggccttcgttttcaaa

SEQ ID NO: 3049 - DNA, 51 bp, Homo sapiens
acacctctttctcttcatcacaaacrccctagttcaatccaccatcattgc

SEQ ID NO: 3050 - DNA, 51 bp, Homo sapiens
aagcaaacccggatatttcaggattyaaaaaaccccacagaggttgaagct

SEQ ID NO: 3051 - DNA, 51 bp, Homo sapiens
atatattggctgtaaccatctccatwaaagattgctaagtgaaaaaccaaa

SEQ ID NO: 3052 - DNA, 51 bp, Homo sapiens
atgtgcagcagcacctacaaaactckatatgatcaaagtttccttaagtgg

SEQ ID NO: 3053 - DNA, 51 bp, Homo sapiens
aatgtctgtggggtcaggtttaatayatttgcactgagctcgtaccaggca

SEQ ID NO: 3054 - DNA, 51 bp, Homo sapiens
ttattttatctatttataacaacgaktatgtggttgaaataagagtatgag

SEQ ID NO: 3055 - DNA, 51 bp, Homo sapiens
agtaaagaagacgtcattcccactgwacctaaaatccaaaatccctactac

SEQ ID NO: 3056 - DNA, 51 bp, Homo sapiens
gaaaaaacagcataccttggaatcaratcctttcaattccacttcatggta

SEQ ID NO: 3057 - DNA, 51 bp, Homo sapiens
tatatcataacacatatcataccaasaacacatcagctgccaaaagaaaga

SEQ ID NO: 3058 - DNA, 51 bp, Homo sapiens
agttgtatctaaaaacctaagccaayataccttttatgactgagcacaaaa

SEQ ID NO: 3059 - DNA, 51 bp, Homo sapiens
aacaggtggatgtctggaagttttcyctacctaacactttcacatataaaa

SEQ ID NO: 3060 - DNA, 51 bp, Homo sapiens
gccattgatcttagaaggaaaattcygcactggtgctgctccaagagatac

SEQ ID NO: 3061 - DNA, 51 bp, Homo sapiens
aaaaatgccttcagccaacctttcaraagttcaccaacccttcgaggccca

SEQ ID NO: 3062 - DNA, 51 bp, Homo sapiens
ttcccagaatgaattcccacgtaaayctaaagaatgctgatggagagaagc

SEQ ID NO: 3063 - DNA, 51 bp, Homo sapiens
aaaggcaaattccaaaggtataatcyaagatgaggcatcatgatcacagag

SEQ ID NO: 3064 - DNA, 51 bp, Homo sapiens
taatgaataagggaccttcgtacagrccctgaggcgacagattaacaggta

SEQ ID NO: 3065 - DNA, 51 bp, Homo sapiens
gcctgtacctgctctgataaccacasctaaatttaagcctatcctgaaaca

SEQ ID NO: 3066 - DNA, 51 bp, Homo sapiens
aaagatataataaaagtggtgttcaraatgattaaatggcaactactgcat

SEQ ID NO: 3067 - DNA, 51 bp, Homo sapiens
gcctgaatgcaccaatgtatgaaaakgaccataactatctccgggaagacc

SEQ ID NO: 3068 - DNA, 51 bp, Homo sapiens
agggttttctccctgtggtgagaaartacgccaggattcactaacagaaaa

SEQ ID NO: 3069 - DNA, 51 bp, Homo sapiens
ctgagtcccttgtgtgtaactagaawctacactcctaggtctcagccacaa

SEQ ID NO: 3070 - DNA, 51 bp, Homo sapiens
gcaatttaaaaaattcaataatttcrcaaactcttatatcccaactaaaac

SEQ ID NO: 3071 - DNA, 51 bp, Homo sapiens
tattatttatctatctatattgtatwacctatcattatctaattgtctatc

SEQ ID NO: 3072 - DNA, 51 bp, Homo sapiens
ggaacaatctggagaactagtgcaargaacaactgggagcctgatagaaag

SEQ ID NO: 3073 - DNA, 51 bp, Homo sapiens
ttctaacttaatcttttatagcccaytcatatcctattttttaagattttg

SEQ ID NO: 3074 - DNA, 51 bp, Homo sapiens
ttgatattgaattaattgcgaagtasagaatgaaaaattttctctcttttg

SEQ ID NO: 3075 - DNA, 51 bp, Homo sapiens
ttattagtattcaatttccagacatragagttagcaaatgtcttaaagctt

SEQ ID NO: 3076 - DNA, 51 bp, Homo sapiens
atgaaattataaaaggataactaatwatagtgtaattgactatcttatggt

SEQ ID NO: 3077 - DNA, 51 bp, Homo sapiens
tgggtgctcttatactttggcaccamcaatttatactacaaaattatggaa

SEQ ID NO: 3078 - DNA, 51 bp, Homo sapiens
gttttgggatgaaactgtgtactacragcagtgcaagaatgtaagccctga

SEQ ID NO: 3079 - DNA, 51 bp, Homo sapiens
tgtttcgaagatattatctgcgattkaaattttttttctattggatgcagt

SEQ ID NO: 3080 - DNA, 51 bp, Homo sapiens
gcctctgtggacttgagagatgaccraatagcaaagaaagtattcataagg

SEQ ID NO: 3081 - DNA, 51 bp, Homo sapiens
tctcatgattaatcttgatagaaaaktatccactgaaaatatgacaagaaa

SEQ ID NO: 3082 - DNA, 51 bp, Homo sapiens
gtaccattttgtacatatctaataarcattgatacattttcgttgaataaa

SEQ ID NO: 3083 - DNA, 51 bp, Homo sapiens
gtttatagggtgtagagattacagarggtcttattcagtaggaggtcattt

SEQ ID NO: 3084 - DNA, 51 bp, Homo sapiens
agtttaaagaggcacaaaagagaaayaatgtttgaccaagataacttatta

SEQ ID NO: 3085 - DNA, 51 bp, Homo sapiens
tatggtagagactatggccaattggraagaatgtgtctggaataaagaggt

SEQ ID NO: 3086 - DNA, 51 bp, Homo sapiens
cctcaattgtatttattacaacacaytccatccgatgttattaactacagg

SEQ ID NO: 3087 - DNA, 51 bp, Homo sapiens
gtatcattttttcaaactgcttttakaatctaactgcttgctaggtttttg

SEQ ID NO: 3088 - DNA, 51 bp, Homo sapiens
aaagttatagttatgaatttcaacaytagattcatggatttggtcataagc

SEQ ID NO: 3089 - DNA, 51 bp, Homo sapiens
tctttcctagttttatcactgtctaygcttaaatatcctgaaatcttttat

SEQ ID NO: 3090 - DNA, 51 bp, Homo sapiens
atttaacaaaatgattttaacagatygaatgggagttcttacatccttaac

SEQ ID NO: 3091 - DNA, 51 bp, Homo sapiens
aaacctacaatcgttggaaagattgyacttgattcttagtctcttagacct

SEQ ID NO: 3092 - DNA, 51 bp, Homo sapiens
cacacatatcccttatgataacctcrcttactacatctcaacaattcaaca

SEQ ID NO: 3093 - DNA, 51 bp, Homo sapiens
gcccctagaagtgacactcaatcacycaagactctagtgaaaatataaagg

SEQ ID NO: 3094 - DNA, 51 bp, Homo sapiens
gtataacaatgatcctcaattattaygttaagtgcatgaatagagatgtca

SEQ ID NO: 3095 - DNA, 51 bp, Homo sapiens
gatttgtgtttgatgtcaataaactwaatgagacacaatcttcccctcaag

SEQ ID NO: 3096 - DNA, 51 bp, Homo sapiens
taactagcattttctgtttcttcagkaacatctagctctctgaagtctttt

SEQ ID NO: 3097 - DNA, 51 bp, Homo sapiens
gacaatatggctgagaagctctagayattttgcatagtgtcatatagctga

SEQ ID NO: 3098 - DNA, 51 bp, Homo sapiens
aaaatgccccagataaacaatcatgyattagaaacagaatctagaagccca

SEQ ID NO: 3099 - DNA, 51 bp, Homo sapiens
attcttccctctgtgctcatgaagayaacatggtttagaatttacaaaagg

SEQ ID NO: 3100 - DNA, 51 bp, Homo sapiens
aaataaaagccaattaaaattaaggraagtatataggcctgagttaataaa

SEQ ID NO: 3101 - DNA, 51 bp, Homo sapiens
ataatactagcttataatttctacamgtaatgatgtattgacaagtgaaat

SEQ ID NO: 3102 - DNA, 51 bp, Homo sapiens
aaaagctagctgaaaccaaggaagaygagagaagaaaccccaacccaggac

SEQ ID NO: 3103 - DNA, 51 bp, Homo sapiens
attttacatgactgaaaaaagagtasggtctcattatatgttcccagggga

SEQ ID NO: 3104 - DNA, 51 bp, Homo sapiens
ggaatagaacacagtgtatcagaaakaagggcagcaagcaatctgaacaag

SEQ ID NO: 3105 - DNA, 51 bp, Homo sapiens
aggatggataatttgagtcatagaamggttaaatagcttgcttgaaactat

SEQ ID NO: 3106 - DNA, 51 bp, Homo sapiens
ttcagattttcttgatgtggtagaargtaggttttcagtaaagactgaggt

SEQ ID NO: 3107 - DNA, 51 bp, Homo sapiens
aaaatattttaaaacaatgacataamagaacaagcattaatcagtgtctag

SEQ ID NO: 3108 - DNA, 51 bp, Homo sapiens
ataatttttcaagaagagtctcacaytttctttcagggtatagctattagt

SEQ ID NO: 3109 - DNA, 51 bp, Homo sapiens
gtcattttgtaccttcatttaaataratatctgcaatcatataatttttca

SEQ ID NO: 3110 - DNA, 51 bp, Homo sapiens
atgaaatagtctcttttaatttgctwagatttatggacatgatattatgtg

SEQ ID NO: 3111 - DNA, 51 bp, Homo sapiens
gagtgatggcaaaatgggtgaaaackcaggtagccaatgactctccctgag

SEQ ID NO: 3112 - DNA, 51 bp, Homo sapiens
tcaggaagcaccatggttcaacctcratattttggaactttgaagtttctg

SEQ ID NO: 3113 - DNA, 51 bp, Homo sapiens
aattccatctctacagtatttttgayagatgccaactgattgactcattag

SEQ ID NO: 3114 - DNA, 51 bp, Homo sapiens
ggtaagcaatagccacttctgttacratatgtgttttaaactgacattctc

SEQ ID NO: 3115 - DNA, 51 bp, Homo sapiens
atttttcatttgctctgtaattatcygaacctttgcaaacactgtgatttc

SEQ ID NO: 3116 - DNA, 51 bp, Homo sapiens
ctttaagatctagaaagagatttcaygtctacgaacacagtgaattaaaaa

SEQ ID NO: 3117 - DNA, 51 bp, Homo sapiens
tgttttatgctaactttgaggtccargaaaaatctttattcctacaagaag

SEQ ID NO: 3118 - DNA, 51 bp, Homo sapiens
gacctctctatacagcacagccttasagtcatcagaaagccagttttaaag

SEQ ID NO: 3119 - DNA, 51 bp, Homo sapiens
tataaatattacggtatattacatargtaacaaataaatacattcgtgatc

SEQ ID NO: 3120 - DNA, 51 bp, Homo sapiens
ctcctacttaattcacaatagatgcycgaaatagtgaagggaaattctatg

SEQ ID NO: 3121 - DNA, 51 bp, Homo sapiens
attaaaaagccttcctggaagcatamctaagtaaaggcaaatacatcacat

SEQ ID NO: 3122 - DNA, 51 bp, Homo sapiens
aacagaccaggttttgataccagaaraactgcatggtgtctatgatgttaa

SEQ ID NO: 3123 - DNA, 51 bp, Homo sapiens
tattaaggacattacttgtaatagcraaatgtccttcactttatttgagct

SEQ ID NO: 3124 - DNA, 51 bp, Homo sapiens
gaaaacagataaattctaggttataraaggccacggaggactatggaagct

SEQ ID NO: 3125 - DNA, 51 bp, Homo sapiens
gtccctctgcctgaatgctcttccayactcttttcatggttcccttgtttt

SEQ ID NO: 3126 - DNA, 51 bp, Homo sapiens
tagaataagaggcctggagtgtttaygaaaaatccctcatcagggaacctc

SEQ ID NO: 3127 - DNA, 51 bp, Homo sapiens
tgattttgcaggctcataggtaaaakactttgtactgtggacttttgagtt

SEQ ID NO: 3128 - DNA, 51 bp, Homo sapiens
aatgtccaataaaaaatagtctgctsaatttgcaaatttgcaccagagtct

SEQ ID NO: 3129 - DNA, 51 bp, Homo sapiens
ctttctcaaagatgattcaggttccyaaatgtaaaatgaaaatcattcatt

SEQ ID NO: 3130 - DNA, 51 bp, Homo sapiens
agttatatacattatgtgacaactayacaataagtttgttttaatttagtc

SEQ ID NO: 3131 - DNA, 51 bp, Homo sapiens
cataatttgtaatttaacaagtgacrgaatattttgacattagtaaatgaa

SEQ ID NO: 3132 - DNA, 51 bp, Homo sapiens
acgaattataaataaacatgcaaaamagtttatgtaagttagagcaaaaag

SEQ ID NO: 3133 - DNA, 51 bp, Homo sapiens
agtattctgaaggatacataatgaaraagaaatactgtgcttagatgtcta

SEQ ID NO: 3134 - DNA, 51 bp, Homo sapiens
ttaagctcactgaaagtttaaattgyagtagctctgtaggaaatataaata

SEQ ID NO: 3135 - DNA, 51 bp, Homo sapiens
tcatgtaagcatatgtataggcaaakaaaaatgtaaataaaggttaagtgt

SEQ ID NO: 3136 - DNA, 51 bp, Homo sapiens
tcacatttgaagcatgtttttgcacrctacttgcaccctctattttaaatc

SEQ ID NO: 3137 - DNA, 51 bp, Homo sapiens
ttatatatttttaagtcttcctacarattgtctaaacttgacaaaactagt

SEQ ID NO: 3138 - DNA, 51 bp, Homo sapiens
tgcggtgaaaatggaatgaattttasaaccagacatataatgggttccttt

SEQ ID NO: 3139 - DNA, 51 bp, Homo sapiens
tattgtctcttgattgagcagtagawcattagagccataaaaatttgttta

SEQ ID NO: 3140 - DNA, 51 bp, Homo sapiens
acacaaaatagaatgttagcatccartgatttaattcatattcatattcct

SEQ ID NO: 3141 - DNA, 51 bp, Homo sapiens
ggccatggaatagttcccagggccamgcataccagtaattatttgtggctc

SEQ ID NO: 3142 - DNA, 51 bp, Homo sapiens
tttgctaagaaggtcaaatggatgaygaaggatgttgttgagcactcattt

SEQ ID NO: 3143 - DNA, 51 bp, Homo sapiens
cttagttttgtcacttaccgtgttaycctgagcaagtttttaacttctcag

SEQ ID NO: 3144 - DNA, 51 bp, Homo sapiens
tcttagattatgaaaagtacactaawaagaagtctctaacaaccaggcttt

SEQ ID NO: 3145 - DNA, 51 bp, Homo sapiens
aaagtaagaagatgctgtatgtcaaytgtaaggcaagaactgtggtttagt

SEQ ID NO: 3146 - DNA, 51 bp, Homo sapiens
atttattttattgataatgtgtttayatgcattaaatcctttgacagccat

SEQ ID NO: 3147 - DNA, 51 bp, Homo sapiens
taaataactgtagatttacagtaaayggcaaaaccactatgtaaggactta

SEQ ID NO: 3148 - DNA, 51 bp, Homo sapiens
tcaaagcagtcaaggaaacaagtgaygtagggtaagagatgatttatgccc

SEQ ID NO: 3149 - DNA, 51 bp, Homo sapiens
agcaactgggttgttttgctcgaaaycttttgctcttaatgacttttaaaa

SEQ ID NO: 3150 - DNA, 51 bp, Homo sapiens
atgtttagctaaactctgggttacartattagacatagaatgctgaattat

SEQ ID NO: 3151 - DNA, 51 bp, Homo sapiens
gtacatgcatcagcaacgtgtcaaamtcctgaagggtgaagagagttagca

SEQ ID NO: 3152 - DNA, 51 bp, Homo sapiens
tggctcatcacaattaatgaaagatragcgctatataagtttctcctctgg

SEQ ID NO: 3153 - DNA, 51 bp, Homo sapiens
gagagataaggaataaagaagagacraaaagagtgatggaggaagaggatt

SEQ ID NO: 3154 - DNA, 51 bp, Homo sapiens
ctcatctccaacccctttcaaagcaycacccatacggtgaaagagcatctt

SEQ ID NO: 3155 - DNA, 51 bp, Homo sapiens
ggggttcagtctgaggttaaactctkttaatatgtttacaaactgcaactt

SEQ ID NO: 3156 - DNA, 51 bp, Homo sapiens
aaagaaagaaagaaatcactaataartatcaaaggaaggtctagaaaacac

SEQ ID NO: 3157 - DNA, 51 bp, Homo sapiens
gtaataattttcatagcataatagasgactaaaatgcaaagctatttaaca

SEQ ID NO: 3158 - DNA, 51 bp, Homo sapiens
gttttgtgggagagagggttaatgayatcccccaaactccactaccagatt

SEQ ID NO: 3159 - DNA, 51 bp, Homo sapiens
taatgttcgattttcacaaggtctaygacgatcaagaaatttcactctttg

SEQ ID NO: 3160 - DNA, 51 bp, Homo sapiens
ttttttgctattattcagtttactargcatttttacaaatgtttttgtata

SEQ ID NO: 3161 - DNA, 51 bp, Homo sapiens
ctacagaagttttgtacctacataawaattatcatcaataacaacacatag

SEQ ID NO: 3162 - DNA, 51 bp, Homo sapiens
gaagaggggatatacttggtagaaamgttttatatcaactaccacaaaagg

SEQ ID NO: 3163 - DNA, 51 bp, Homo sapiens
actgggttgcacttcacaggcaccaratacggaggacagtttggattccag

SEQ ID NO: 3164 - DNA, 51 bp, Homo sapiens
gatgagtcaaggttggtaatgtttcragttgtactgtaatccagccatttc

SEQ ID NO: 3165 - DNA, 51 bp, Homo sapiens
agtgcttttggctgttacatcttaawattttcaaacttaattctcaaattc

SEQ ID NO: 3166 - DNA, 51 bp, Homo sapiens
agtcacctggcttttcttctttagcrattatatagcgaattacactgatta

SEQ ID NO: 3167 - DNA, 51 bp, Homo sapiens
caatgaaaggtcattgagatgaatayatatcaagtcctgatatctcaattt

SEQ ID NO: 3168 - DNA, 51 bp, Homo sapiens
caaatatttctgatccatttaaaaarggaaggataagctacactgggcttt

SEQ ID NO: 3169 - DNA, 51 bp, Homo sapiens
gatccttaaagtcaataggaagtaascgactgattctggataaaccttttc

SEQ ID NO: 3170 - DNA, 51 bp, Homo sapiens
taccagactaaaaactgccagatgaygaccctcgagtccaatttctcgtta

SEQ ID NO: 3171 - DNA, 51 bp, Homo sapiens
ctgtccaagtgaactgacactgtttsgttccacacggtatctgctaggagc

SEQ ID NO: 3172 - DNA, 51 bp, Homo sapiens
attataagaaaaaagagaataagaayctgaataatatccctacagacaacg

SEQ ID NO: 3173 - DNA, 51 bp, Homo sapiens
tgtcaaggttatcactgggtcttgaycttagggtgccaaaggagactcctg

SEQ ID NO: 3174 - DNA, 51 bp, Homo sapiens
accctgggtgaccacagccatcctcrgtagactttaaacaacaacctactg

SEQ ID NO: 3175 - DNA, 51 bp, Homo sapiens
cactgttgtgtattacttttacttgraaaagaagctattatcattcctact

SEQ ID NO: 3176 - DNA, 51 bp, Homo sapiens
gtgcctccactagacacttcataccrctggcactaaattatcttttcaagt

SEQ ID NO: 3177 - DNA, 51 bp, Homo sapiens
gaaagaaatgaggctgcatttgcaaytgaacttggacactaagtcatcgga

SEQ ID NO: 3178 - DNA, 51 bp, Homo sapiens
acttgctgggaggataaaaatactcwattctgagctgtccaatatggcacc

SEQ ID NO: 3179 - DNA, 51 bp, Homo sapiens
tcagagtaaactaaatcagtatacartgggaaatcatgccttctccacatt

SEQ ID NO: 3180 - DNA, 51 bp, Homo sapiens
cattaatatatccagaatttaaaacrgttcaatttctccagacccagggac

SEQ ID NO: 3181 - DNA, 51 bp, Homo sapiens
atttgttaatactgacagtgttgtcyaagtaaattgcaagatatatcattt

SEQ ID NO: 3182 - DNA, 51 bp, Homo sapiens
atacgtaggtgttaaactaatgcacrgattaaactataagggcaaagaaaa

SEQ ID NO: 3183 - DNA, 51 bp, Homo sapiens
tcaaatgtcttaatggataaggaaasagcccagtgagataacctgacttta

SEQ ID NO: 3184 - DNA, 51 bp, Homo sapiens
aaagtagacacatgtatatcggcaayaataggtagcactcgaacctttcac

SEQ ID NO: 3185 - DNA, 51 bp, Homo sapiens
gcttgagcctctgataaagtcacgcrattgaattttagccccagtaggttg

SEQ ID NO: 3186 - DNA, 51 bp, Homo sapiens
gggtgcccgcctgtcctttcattcayagcttggatgcggctctgcaaattc

SEQ ID NO: 3187 - DNA, 51 bp, Homo sapiens
atagttaactctttagtattttacartctactcgatgaattgaactttttc

SEQ ID NO: 3188 - DNA, 51 bp, Homo sapiens
actcatagcacctagtatttaggaayaaaaaggctggccaagttatgaata

SEQ ID NO: 3189 - DNA, 51 bp, Homo sapiens
gaataaaaaggctggccaagttatgratacaagatggcaagttatcctttc

SEQ ID NO: 3190 - DNA, 51 bp, Homo sapiens
tattgtctgttgaatgtggcctagaraacattgatcagatttcatccctat

SEQ ID NO: 3191 - DNA, 51 bp, Homo sapiens
attgctcaagtaaaaaactgtgatcrataatatcagaaaaagatgagggga

SEQ ID NO: 3192 - DNA, 51 bp, Homo sapiens
gaaatgaaatgatacataatttatasgagaatgaataaatagcattttctc

SEQ ID NO: 3193 - DNA, 51 bp, Homo sapiens
tttttatttattatttagctggaaayataccactatttttacttgtatttg

SEQ ID NO: 3194 - DNA, 51 bp, Homo sapiens
accactatttttacttgtatttgctyggtgaagtgaaatgtttttatatct

SEQ ID NO: 3195 - DNA, 51 bp, Homo sapiens
agcccacggagagctttctaactaakcaccaaaactgagcaactctcaaga

SEQ ID NO: 3196 - DNA, 51 bp, Homo sapiens
aaaattagaacaaagacaaattaaarttagaaatagtggtaagaaaaattg

SEQ ID NO: 3197 - DNA, 51 bp, Homo sapiens
gcttgagtctgtgcaggataatgtaygtgagttttcttttttggccttagg

SEQ ID NO: 3198 - DNA, 51 bp, Homo sapiens
aggttaaacaacttgctcaggatacrcatctaataatgagggaaaatgggg

SEQ ID NO: 3199 - DNA, 51 bp, Homo sapiens
ttatgcatattttaattatggtatayccaagcctgatttttcatccagtgc

SEQ ID NO: 3200 - DNA, 51 bp, Homo sapiens
aagaaaaataaaacaataaatcacayaggctgtaaccttcagagtctgaag

SEQ ID NO: 3201 - DNA, 51 bp, Homo sapiens
caatgagaaacaccaggaatgtctgycacttggccagttcctgtgtctcca

SEQ ID NO: 3202 - DNA, 51 bp, Homo sapiens
atgggacttagtacactggtgactaygattaaaagggaaagagctttaaaa

SEQ ID NO: 3203 - DNA, 51 bp, Homo sapiens
gagtccatgagtgggatttcccttaygatatggagtctcagccttctcaga

SEQ ID NO: 3204 - DNA, 51 bp, Homo sapiens
aaaatttaaaagggtacaagatcaayggtgtctcctaggatgttactgagc

SEQ ID NO: 3205 - DNA, 51 bp, Homo sapiens
atcctgataacattactttgccacaycacagaaccaagggtttcttctggt

SEQ ID NO: 3206 - DNA, 51 bp, Homo sapiens
tcccaccaaaaaattgtttaagtgakgttaattgagtcctgggaaagttta

SEQ ID NO: 3207 - DNA, 51 bp, Homo sapiens
ggctgttcagagcctcttgggtagcwaacagatggcttctgttgtatacaa

SEQ ID NO: 3208 - DNA, 51 bp, Homo sapiens
gtattaaaaaaactatctttacctgyagtctcttaattctagcaaattaat

SEQ ID NO: 3209 - DNA, 51 bp, Homo sapiens
ttacagagaataaacatttagattgktgtaagcctttgactaatttctaga

SEQ ID NO: 3210 - DNA, 51 bp, Homo sapiens
ttagaacacattgagtccacttggaraagccgattaagtcttgggctgctg

SEQ ID NO: 3211 - DNA, 51 bp, Homo sapiens
tcccacctgtgtttcttcccagttakgagaactatttaataagcctcaggg

SEQ ID NO: 3212 - DNA, 51 bp, Homo sapiens
ctccccttttaacctcctggtatgamgtatggaagaatcagcagccaacac

SEQ ID NO: 3213 - DNA, 51 bp, Homo sapiens
ccttgtaattgtcaaaagtaagaccrcaagagctggtatagggcatgctac

SEQ ID NO: 3214 - DNA, 51 bp, Homo sapiens
aaagcttacccaggctggtagagaaygggcacggcaagcgtgaagttagga

SEQ ID NO: 3215 - DNA, 51 bp, Homo sapiens
aacctagtctttgctgaggacaagayatgttgacaaacccaggcacaagga

SEQ ID NO: 3216 - DNA, 51 bp, Homo sapiens
gaatttctttatggagtggttaatastatgagtccttgctgccaaacagct

SEQ ID NO: 3217 - DNA, 51 bp, Homo sapiens
cagttagagaaataataaaataacayctaaaatgggcatatattgataaaa

SEQ ID NO: 3218 - DNA, 51 bp, Homo sapiens
attgcactatgtagcttttgcacacyaaaactcattttattatcaaaacca

SEQ ID NO: 3219 - DNA, 51 bp, Homo sapiens
ttcttccacttcctagacatgtaagyacaaatttggaatgctgggtagaag

SEQ ID NO: 3220 - DNA, 51 bp, Homo sapiens
tacagtatttttattcattaaggatktctaacaccaaactacatttctagt

SEQ ID NO: 3221 - DNA, 51 bp, Homo sapiens
ctggtacaaataccctggattgctastaaaaatgcagaataacacacacta

SEQ ID NO: 3222 - DNA, 51 bp, Homo sapiens
caaaatgtggctcctgaaagaagaaytgggcactgttaccaaaagcagaaa

SEQ ID NO: 3223 - DNA, 51 bp, Homo sapiens
tttatgcagaaatccattcatttcayctgttcaaaacatagttatgtttac

SEQ ID NO: 3224 - DNA, 51 bp, Homo sapiens
gaacaggaagtgatatgcatatgacratatatgacgtgatatagaaggtat

SEQ ID NO: 3225 - DNA, 51 bp, Homo sapiens
ccagaaatagtgaatcccggagaacsagcttgaacaagtccaagcttctgc

SEQ ID NO: 3226 - DNA, 51 bp, Homo sapiens
gtgtgtattcatattttttaacatamattgtgacatgattctgtggaacaa

SEQ ID NO: 3227 - DNA, 51 bp, Homo sapiens
agccaccagactcattccccaggatmaactaagaggtgacagaaatgcttc

SEQ ID NO: 3228 - DNA, 51 bp, Homo sapiens
ttatcaataagcacaataatagcaartagtcaatgatataataggtacatt

SEQ ID NO: 3229 - DNA, 51 bp, Homo sapiens
ctcatctgagccttattataattcawgtctatacattgcaagtgacagtgg

SEQ ID NO: 3230 - DNA, 51 bp, Homo sapiens
atccattaaaatgtaattactgatawgataggattttcaggtgccattttg

SEQ ID NO: 3231 - DNA, 51 bp, Homo sapiens
ccttgaagctgttaaccactcgatcyaatcttagggcagtgtcacattcca

SEQ ID NO: 3232 - DNA, 51 bp, Homo sapiens
aattcccatagcttgagagacatgayatttttatgtatagacttttcaaat

SEQ ID NO: 3233 - DNA, 51 bp, Homo sapiens
gctgccaaatgtaaccactaatacckgacctggcagactctcaggactatg

SEQ ID NO: 3234 - DNA, 51 bp, Homo sapiens
atttcacagaaatattttttccttasactatgtgatcatgagggtcattgc

SEQ ID NO: 3235 - DNA, 51 bp, Homo sapiens
gatagagtggtcattctactctgacrcaaaacctaactgctcacatgaata

SEQ ID NO: 3236 - DNA, 51 bp, Homo sapiens
aaacagatgcaatttaggtgaaacasggttactctgaaggtcaatgccaca

SEQ ID NO: 3237 - DNA, 51 bp, Homo sapiens
ttctagatgatgttagattttggctstgttctcaacttcttccaacttcat

SEQ ID NO: 3238 - DNA, 51 bp, Homo sapiens
gtttatgttagttcttgtctgcattygttaaaggaaaactatagcttttaa

SEQ ID NO: 3239 - DNA, 51 bp, Homo sapiens
tcaattgcccttaacctcagactcasacttttatagataagaatttatcat

SEQ ID NO: 3240 - DNA, 51 bp, Homo sapiens
gagtaaagaataagacacataaaaartaaaagtaggccgggagccatggct

SEQ ID NO: 3241 - DNA, 51 bp, Homo sapiens
gcagagtcaatatagaattgaattaygatgcaagcatgactatttagcaaa

SEQ ID NO: 3242 - DNA, 51 bp, Homo sapiens
ttcttccatccttggatttacagtasagatttcttctgaatgggtagaata

SEQ ID NO: 3243 - DNA, 51 bp, Homo sapiens
ttaacaggcatccatgctccacagaygatcttttttactcattttacaaaa

SEQ ID NO: 3244 - DNA, 51 bp, Homo sapiens
aaagcaatttttataccactattcckaaattttcagtcacattccttttca

SEQ ID NO: 3245 - DNA, 51 bp, Homo sapiens
aaaatattttgcattgtaaaagatcraaaacataaaggcttacttgacaaa

SEQ ID NO: 3246 - DNA, 51 bp, Homo sapiens
gcctaccctatgttccaacaaacccrttcataggtatacaccacagagaac

SEQ ID NO: 3247 - DNA, 51 bp, Homo sapiens
gagttcccccaaagatgagtacaaaytatctacagcagttttattcattac

SEQ ID NO: 3248 - DNA, 51 bp, Homo sapiens
ctaaacaagttaattccctttctcasggcatgatcaagttgagacaagcgt

SEQ ID NO: 3249 - DNA, 51 bp, Homo sapiens
aaaaccttttgagtgcaagtgactcraacaaatatattaacagagcttaca

SEQ ID NO: 3250 - DNA, 51 bp, Homo sapiens
gctaagcctgagtgtctctccagaayctgtctccaacagtttatagaattc

SEQ ID NO: 3251 - DNA, 51 bp, Homo sapiens
tagctttgtagttctgcacccaaaaycattctcctcaggcgataaaatact

SEQ ID NO: 3252 - DNA, 51 bp, Homo sapiens
gtcctatttgcttatgagtttcatcraaggcatgtttcaaacccatgaagc

SEQ ID NO: 3253 - DNA, 51 bp, Homo sapiens
ttctgtgccaagagtctcattcataygccttgagccacccaggcagagcac

SEQ ID NO: 3254 - DNA, 51 bp, Homo sapiens
ctaccagagccaggtgacagcaaccmgaatggtctatgggatatttacatc

SEQ ID NO: 3255 - DNA, 51 bp, Homo sapiens
ttcaaccctccaccacaggatctacrgaggacatccacatctgcaattaca

SEQ ID NO: 3256 - DNA, 51 bp, Homo sapiens
ttctctgaacttaagaatggtgcccraatgaacctttacaaaccatgcaaa

SEQ ID NO: 3257 - DNA, 51 bp, Homo sapiens
ttgcggaggagccgtcattacaacartcgtgttctgagactaggagcaacg

SEQ ID NO: 3258 - DNA, 51 bp, Homo sapiens
gacataactccaagtgttatattaawtgttctattttatattagctctaat

SEQ ID NO: 3259 - DNA, 51 bp, Homo sapiens
ctaatggtctttacatacagcctacmttttaactaactcttgcatgggctt

SEQ ID NO: 3260 - DNA, 51 bp, Homo sapiens
ataaagattgtaaattggcattttcratagctctaggaagtttagacaacg

SEQ ID NO: 3261 - DNA, 51 bp, Homo sapiens
cagactctctccaaagttaaatcaargagaaatattgttttttccattatg

SEQ ID NO: 3262 - DNA, 51 bp, Homo sapiens
atttggctggggaatactttactctyagaaatggggagatcataagtggtg

SEQ ID NO: 3263 - DNA, 51 bp, Homo sapiens
ctctaatgatttatgaggttaaaagrctccctcctcagtaggggtgagctt

SEQ ID NO: 3264 - DNA, 51 bp, Homo sapiens
tcttattgtgatcaactaaactcaasaggagagtgctgtgatcaattagta

SEQ ID NO: 3265 - DNA, 51 bp, Homo sapiens
acgtcacctgtgaactctgagaagaygaggttgggatctctggccacagtg

SEQ ID NO: 3266 - DNA, 51 bp, Homo sapiens
aaagtgcagttcatgatgtcaaaagwaacttgccaactggttccagtccac

SEQ ID NO: 3267 - DNA, 51 bp, Homo sapiens
gagtacatgattaaatgaggtaatayatggttagtgccagagcagtgctgg

SEQ ID NO: 3268 - DNA, 51 bp, Homo sapiens
tccctttgatagtgactttttaaaasagagtggccacactgcattccactg

SEQ ID NO: 3269 - DNA, 51 bp, Homo sapiens
gagaggccctagaatgatgaagtgaygtgttaagttccatagataacaaca

SEQ ID NO: 3270 - DNA, 51 bp, Homo sapiens
tagctctgtgaccttagacaagttastaaagctctcctggtcacagttttt

SEQ ID NO: 3271 - DNA, 51 bp, Homo sapiens
cactgcctaatgatgatgaacccatkacaagacaatgaaacatgctcattc

SEQ ID NO: 3272 - DNA, 51 bp, Homo sapiens
ccacacaaatcaaagcacatttccartgccactccatctgaagttttgaca

SEQ ID NO: 3273 - DNA, 51 bp, Homo sapiens
atgtaagaacacccaagtcagtcacrgtcatgagggtaaagcatgacttaa

SEQ ID NO: 3274 - DNA, 51 bp, Homo sapiens
ttgttttcactttttatagttatctraaacagcaataaatcatcatcatga

SEQ ID NO: 3275 - DNA, 51 bp, Homo sapiens
aggaaattgaaacataatatgctagratggttaattggggagaagaaaact

SEQ ID NO: 3276 - DNA, 51 bp, Homo sapiens
acagataagctggatttcattaaatyaaacattgctgctctttgatagaca

SEQ ID NO: 3277 - DNA, 51 bp, Homo sapiens
gtggtctcctctgtaaataatgagamggcaaaaaaggtgtcaggggatatg

SEQ ID NO: 3278 - DNA, 51 bp, Homo sapiens
ggagtttgttttcccactctctgcargaaagttaatcaattttagaaccag

SEQ ID NO: 3279 - DNA, 51 bp, Homo sapiens
agttatatcctccttcttcaaaactsaggtccaatcttacctctcagcaaa

SEQ ID NO: 3280 - DNA, 51 bp, Homo sapiens
cattgaggatatacacaaactccctmaatcagttgcaatttttgttgaaga

SEQ ID NO: 3281 - DNA, 51 bp, Homo sapiens
ctgggttgcattattactctcaaagwatgttttcctgcttgtttaattcaa

SEQ ID NO: 3282 - DNA, 51 bp, Homo sapiens
tctttgagagtaataatgcaacccaratcaaagcaatcactgaggaactac

SEQ ID NO: 3283 - DNA, 51 bp, Homo sapiens
tgggtgtctgagaaagatgaagagaraggcatcgtttattctgagaatgtg

SEQ ID NO: 3284 - DNA, 51 bp, Homo sapiens
aattataaccactcttcttggactcsagctatttcacttgaaatccattat

SEQ ID NO: 3285 - DNA, 51 bp, Homo sapiens
gagtaaatgacctatctgagcagtarcatcttcgattctttgatctgggga

SEQ ID NO: 3286 - DNA, 51 bp, Homo sapiens
ctagtaatttctctctctatctttckcatgtacttttgcaaataaaaacag

SEQ ID NO: 3287 - DNA, 51 bp, Homo sapiens
cacatgcttcttggaatgaaacaaartcttaaaattggatattttgtggtc

SEQ ID NO: 3288 - DNA, 51 bp, Homo sapiens
aataaaaatgaaaataaatgtataarataacttctcattctagtacagtta

SEQ ID NO: 3289 - DNA, 51 bp, Homo sapiens
tttcagttaggcaaatttttctagcraatctccttgaactcctccctgcaa

SEQ ID NO: 3290 - DNA, 51 bp, Homo sapiens
agctgatgataaaggccggaacctcrcttctcttccctaggttgttttttt

SEQ ID NO: 3291 - DNA, 51 bp, Homo sapiens
actcatttaagcagttttgttactamccatcatttcaacctgcttagttgt

SEQ ID NO: 3292 - DNA, 51 bp, Homo sapiens
atttcatattaggtgatatttgacascatccaggatacatgaatccttttc

SEQ ID NO: 3293 - DNA, 51 bp, Homo sapiens
gcttttaggtctaagttttgtttgayggctggatttgcactgacacttgta

SEQ ID NO: 3294 - DNA, 51 bp, Homo sapiens
tctggtttcactgaaatacaatccaygcagagtaaatacatgatattttcc

SEQ ID NO: 3295 - DNA, 51 bp, Homo sapiens
tgtgattttttaaacagatttttcayctaaactgtaattcatcatatataa

SEQ ID NO: 3296 - DNA, 51 bp, Homo sapiens
aaactgggatcaaagacagtgtatcrgaagaaaagatgcacttggtacccc

SEQ ID NO: 3297 - DNA, 51 bp, Homo sapiens
aatcaaattttacccattctttaagkcctgtcatgtggcccaattatttca

SEQ ID NO: 3298 - DNA, 51 bp, Homo sapiens
cttacattctcagttgaagatcacayaagctaagagtggcgccttccacag

SEQ ID NO: 3299 - DNA, 51 bp, Homo sapiens
gagcataaaatcctacctaaaaaacygacagtgatgtgtttttctagatta

SEQ ID NO: 3300 - DNA, 51 bp, Homo sapiens
tgccatgccaagccatattggaaackaattttgacaagatgtttcagatgg

SEQ ID NO: 3301 - DNA, 51 bp, Homo sapiens
ttgaacacactaggctcattaccacmatatataacttattctcttgaacac

SEQ ID NO: 3302 - DNA, 51 bp, Homo sapiens
cagaaagggaagctgagactctaagwagtaaaatgaattattcaatcagtt

SEQ ID NO: 3303 - DNA, 51 bp, Homo sapiens
agtagctctcaagtttgtgttttatsaacttctgatgccatgactatactg

SEQ ID NO: 3304 - DNA, 51 bp, Homo sapiens
aaaaacctgtccttcaagggcataaytgaataaatcaaaaataaagagaaa

SEQ ID NO: 3305 - DNA, 51 bp, Homo sapiens
tctgttagagtttctgtttttaacgracatttgggtactgaatacagtgaa

SEQ ID NO: 3306 - DNA, 51 bp, Homo sapiens
agattagagacagtaaaattccagayaggtaagacgtaactgacctctgta

SEQ ID NO: 3307 - DNA, 51 bp, Homo sapiens
tattctgaaagtataatatttaagargtttggctaagaaactggaaaatac

SEQ ID NO: 3308 - DNA, 51 bp, Homo sapiens
ctgagattcatttttttgcagaaagratatagtaacagctaaattgggtca

SEQ ID NO: 3309 - DNA, 51 bp, Homo sapiens
ttttgggctttgaaaattatgagtakgaaattgggaataatagaacgtggg

SEQ ID NO: 3310 - DNA, 51 bp, Homo sapiens
tacaacataatcagagagaaatctawcaggaaacaaaatttccaggcattc

SEQ ID NO: 3311 - DNA, 51 bp, Homo sapiens
tcagaaggcagcgactctcacttaawggtgcctcagctactctggggagct

SEQ ID NO: 3312 - DNA, 51 bp, Homo sapiens
aagggtggggtccagagaagtaagtsaatgttctgaagacatagatgctac

SEQ ID NO: 3313 - DNA, 51 bp, Homo sapiens
aaatctgttcatgcgtatctggtagwcaagaccatttgaaaagtaggtgtg

SEQ ID NO: 3314 - DNA, 51 bp, Homo sapiens
tagatttccattgtcttatgggaacygtgacattttgacaggcagctccat

SEQ ID NO: 3315 - DNA, 51 bp, Homo sapiens
gagttttgacagaaagctcgaagacmagaatagaataggtccaagtactct

SEQ ID NO: 3316 - DNA, 51 bp, Homo sapiens
ctcccaggaatgttggctcttcctakaataatctatatgttcttgaggaat

SEQ ID NO: 3317 - DNA, 51 bp, Homo sapiens
agtcacataaacattcatcttcaaaytttaataaatatcgtaattgttatt

SEQ ID NO: 3318 - DNA, 51 bp, Homo sapiens
tggcatttaaagtttcctctcccaartaatctttgagacacttgcttattg

SEQ ID NO: 3319 - DNA, 51 bp, Homo sapiens
acaaagcatttgatcaaatctaacaycacttatgataaaaactatcagtaa

SEQ ID NO: 3320 - DNA, 51 bp, Homo sapiens
agaacattatagcttgcttagctaamcattatatttccaaatccatttcca

SEQ ID NO: 3321 - DNA, 51 bp, Homo sapiens
agtttagtgcagtggtggagaaaagwatccctttgaatgatacctgattaa

SEQ ID NO: 3322 - DNA, 51 bp, Homo sapiens
cctaaaccaattcatatcctcctcasgttaactagcatctatttttgttgc

SEQ ID NO: 3323 - DNA, 51 bp, Homo sapiens
ttctctcggggaaagggccttggtgsaattaacagcttttaagccagagaa

SEQ ID NO: 3324 - DNA, 51 bp, Homo sapiens
ccaaagagggattctgcacattatcratattaacagctccaggcacatctg

SEQ ID NO: 3325 - DNA, 51 bp, Homo sapiens
tgttgttaaactgctgacggttgatraaggggcactgagacagcaacaata

SEQ ID NO: 3326 - DNA, 51 bp, Homo sapiens
cacaaaagctggagataatggagaaygatgctgagaaatggaaaagcgagg

SEQ ID NO: 3327 - DNA, 51 bp, Homo sapiens
aggctaagtgagtagccgagtgttasatgagccactcaaatccaggggttc

SEQ ID NO: 3328 - DNA, 51 bp, Homo sapiens
tgcataagcagtttctagcctcagargaatgctctcattttctttttcttt

SEQ ID NO: 3329 - DNA, 51 bp, Homo sapiens
aaaaaatgtatccaaactttgtcatraatacattagtttactttttaactt

SEQ ID NO: 3330 - DNA, 51 bp, Homo sapiens
ctggatcccctaaaataatttgacargctatcaataggtatataaaaaaaa

SEQ ID NO: 3331 - DNA, 51 bp, Homo sapiens
atatttaaactgtgttggcataaagkcaactcatagttttcttgccacttg

SEQ ID NO: 3332 - DNA, 51 bp, Homo sapiens
catgagccgccacacctggcctacayattttaataccctcagacaatacag

SEQ ID NO: 3333 - DNA, 51 bp, Homo sapiens
tttgagtgacaaagtaaacataaggragaagccacatttctctaagcttag

SEQ ID NO: 3334 - DNA, 51 bp, Homo sapiens
ggggagattttgagttgtcaagaaargaagaactctgaacttttggcacag

SEQ ID NO: 3335 - DNA, 51 bp, Homo sapiens
gccaatgggttgcctgagtaggagaytggaaggaaggagaagagtattgct

SEQ ID NO: 3336 - DNA, 51 bp, Homo sapiens
agtttagttcaaacattgtattaaawattatccatgaaacagtcgctgggc

SEQ ID NO: 3337 - DNA, 51 bp, Homo sapiens
taaagacgtctgggtatcttcagtaygtaaaaagctgtgggaaaaaagagt

SEQ ID NO: 3338 - DNA, 51 bp, Homo sapiens
cctttttattatattttgccttaccmatttatcccttgggaaattgtattg

SEQ ID NO: 3339 - DNA, 51 bp, Homo sapiens
tctatgtaatctagcccattattaasaaagagaatgctccctgtcttttga

SEQ ID NO: 3340 - DNA, 51 bp, Homo sapiens
tctaagggccgctgtcatcatacccrgacatggttgcctttactgcactag

SEQ ID NO: 3341 - DNA, 51 bp, Homo sapiens
ttctcattaggtctcttggagtaaaygatttttgcaggatagagtggaaat

SEQ ID NO: 3342 - DNA, 51 bp, Homo sapiens
aagcaccgaacacctgaggactccawgtatttatgatttaggcccaaattt

SEQ ID NO: 3343 - DNA, 51 bp, Homo sapiens
actgatggagagctaacaccttcccragcatgcagcacatgtcttctgaaa

SEQ ID NO: 3344 - DNA, 51 bp, Homo sapiens
gtagctgcgcatccattgatgattcyaaggtgaaactgcacagtgtggttc

SEQ ID NO: 3345 - DNA, 51 bp, Homo sapiens
cagcaggctgtaccaggctgccctgyttgtgccttagtgggaagcccagtg

SEQ ID NO: 3346 - DNA, 51 bp, Homo sapiens
gcctgaccttccccatcctctaactyacaagatttcaaatgaaagtaggct

SEQ ID NO: 3347 - DNA, 51 bp, Homo sapiens
ggagatcaaagctctattttaggacractcactcaatgatgttgttcaggc

SEQ ID NO: 3348 - DNA, 51 bp, Homo sapiens
gagcctccttgaaggaattcagggamcttataccagatatatttacacaac

SEQ ID NO: 3349 - DNA, 51 bp, Homo sapiens
atggcttgtctcacaaaatgctcacygaataagctgttatcactgtttatc

SEQ ID NO: 3350 - DNA, 51 bp, Homo sapiens
tgtttttgaaatcaagagagcccaasaaatcttagggaagtgctggctgat

SEQ ID NO: 3351 - DNA, 51 bp, Homo sapiens
ttgcagcaatgtgcttgaaaaaccayaatctctacctggataaatatcttt

SEQ ID NO: 3352 - DNA, 51 bp, Homo sapiens
tgaccgcaatctgcatgaagctaaayggttatgtgatgacatactggttta

SEQ ID NO: 3353 - DNA, 51 bp, Homo sapiens
tactcgaatagtggtcttagtcaaartgaggccatattaacgtgtgggtca

SEQ ID NO: 3354 - DNA, 51 bp, Homo sapiens
ttgtttgaggcgtagtagaatctatyagcttgagaaattggtctggaaatc

SEQ ID NO: 3355 - DNA, 51 bp, Homo sapiens
ctcctctccttctttgcttccatccrtcaacccatttgctgaagaagaaaa

SEQ ID NO: 3356 - DNA, 51 bp, Homo sapiens
gtcttgcgctgctttctgaattcacyggttacctcggcactgtcttctttc

SEQ ID NO: 3357 - DNA, 51 bp, Homo sapiens
atacataaacatatatggcagagaamgtcaatattttcaaatatgaaaaag

SEQ ID NO: 3358 - DNA, 51 bp, Homo sapiens
tattgcccctgaatgtttctgcaaasgttcttcaagcacaggtgaaatgca

SEQ ID NO: 3359 - DNA, 51 bp, Homo sapiens
tgtgaggctggtagtccactaagaamctaagccctatttcagtagatagct

SEQ ID NO: 3360 - DNA, 51 bp, Homo sapiens
gagatgcattaggcactgactggtasgctatgcagagatcaggtttagccc

SEQ ID NO: 3361 - DNA, 51 bp, Homo sapiens
agctcagagtccaatgggagaacaaraacacgctcaagacagcatgataag

SEQ ID NO: 3362 - DNA, 51 bp, Homo sapiens
atctgtcaggttaggctagattacasctcaataacaaattcccaaatctca

SEQ ID NO: 3363 - DNA, 51 bp, Homo sapiens
tctgccacctttctctataaatatcrctatgttacacattagatttgagaa

SEQ ID NO: 3364 - DNA, 51 bp, Homo sapiens
agttgtttaattttcccgagaaaaaytgtagctcagcatgttaagatagtc

SEQ ID NO: 3365 - DNA, 51 bp, Homo sapiens
cctcactgtggtcagatgtgtagatsagttaattctatgtctttttataat

SEQ ID NO: 3366 - DNA, 51 bp, Homo sapiens
aatcatccttggctttccttttaaasgctattttgaaatggtcttttcact

SEQ ID NO: 3367 - DNA, 51 bp, Homo sapiens
ggttgatctgaggtcctgcttagacraacccatgtaaacatacattacaaa

SEQ ID NO: 3368 - DNA, 51 bp, Homo sapiens
accatgaacgtgaagtgaaattggcsgagaacctttgaccagcatgccctg

SEQ ID NO: 3369 - DNA, 51 bp, Homo sapiens
agctcagtaaaggacggcgagtgtcraaagccatgtctccaagcacatgcc

SEQ ID NO: 3370 - DNA, 51 bp, Homo sapiens
cttattgactctggttatgttattaygggaactgactccactagggccagg

SEQ ID NO: 3371 - DNA, 51 bp, Homo sapiens
ttacagaaataaccaatgtatttccrgtgcagtgttctatcttagctgaca

SEQ ID NO: 3372 - DNA, 51 bp, Homo sapiens
caagtccatagaacatctgcaatgawgctctaggtcagaggggtgcagctg

SEQ ID NO: 3373 - DNA, 51 bp, Homo sapiens
taatgtcatctgtacagaactatagkgtgcctttcattaaaatactccact

SEQ ID NO: 3374 - DNA, 51 bp, Homo sapiens
tttgaggctagtaacacaatttagamcagaataggttttcatatatcaaaa

SEQ ID NO: 3375 - DNA, 51 bp, Homo sapiens
ttaaaaatttttgtttggttatatcraaatagttacaggcactaaagttag

SEQ ID NO: 3376 - DNA, 51 bp, Homo sapiens
aagctcaatatcttattaaatttcayagctcaaaaactttttgatttgaaa

SEQ ID NO: 3377 - DNA, 51 bp, Homo sapiens
tattcttctgaccatgagctccttcsatcctgtatattatgtctccatttt

SEQ ID NO: 3378 - DNA, 51 bp, Homo sapiens
agcatttaaccctaggtagtgttcgycacccacataaaaggcctttccccc

SEQ ID NO: 3379 - DNA, 51 bp, Homo sapiens
aattttttttttcgattaacaagaaraaccgtgagtactagggatgtctgg

SEQ ID NO: 3380 - DNA, 51 bp, Homo sapiens
tttcccttacatctgtattataaaaytcccttcacagaggtatagaagaaa

SEQ ID NO: 3381 - DNA, 51 bp, Homo sapiens
acaaacgaagagccttcaaactaccyagatgagatcaaacgtcgatgacat

SEQ ID NO: 3382 - DNA, 51 bp, Homo sapiens
tacaagttgatgtgtggcaaatacaygctctagaaataatttgataaatgg

SEQ ID NO: 3383 - DNA, 51 bp, Homo sapiens
gatgtcattactgattttggttaaayacttgtttgcttctggactctttat

SEQ ID NO: 3384 - DNA, 51 bp, Homo sapiens
gtgctttaaattgaaggtttctgtcyaatgaatttaaaagacaactacata

SEQ ID NO: 3385 - DNA, 51 bp, Homo sapiens
aaaaaataaattttataactttccartcagatgcaccaaaatatagcatgg

SEQ ID NO: 3386 - DNA, 51 bp, Homo sapiens
ttaatttggaaatactattgaaatakatatgagaatgcaattgatcttaca

SEQ ID NO: 3387 - DNA, 51 bp, Homo sapiens
tttaagcatcttgacagttaaaagarattaggaaaagtagatagacatggg

SEQ ID NO: 3388 - DNA, 51 bp, Homo sapiens
atcgccttttcctctatgtcaactayctcttctgttctcagaggttaattt

SEQ ID NO: 3389 - DNA, 51 bp, Homo sapiens
ttcagagactacataacaaaatcaaracgttgaaatttagcggctgtcctt

SEQ ID NO: 3390 - DNA, 51 bp, Homo sapiens
caaattaaaccccatcggtttttcargagaagatactgtgatccagaggtg

SEQ ID NO: 3391 - DNA, 51 bp, Homo sapiens
atgacttctaaatcagcatgttaaartatttgaagtaaggatagtatatat

SEQ ID NO: 3392 - DNA, 51 bp, Homo sapiens
accacctggaagtctttttttaacaygattttgagacccatccatattttc

SEQ ID NO: 3393 - DNA, 51 bp, Homo sapiens
gtcctagaaattcatccatcctacaytgataatatttttaatagatatagg

SEQ ID NO: 3394 - DNA, 51 bp, Homo sapiens
ttgatccatatgatcattaccttacsagaaatgcctgaccaacaggtcatt

SEQ ID NO: 3395 - DNA, 51 bp, Homo sapiens
ttgatattttcattatctatgtaaaygaagtggtagtttatcagactgaac

SEQ ID NO: 3396 - DNA, 51 bp, Homo sapiens
gataatgaaaatatcaagtccattaytaagataaattagaaatgaatgtat

SEQ ID NO: 3397 - DNA, 51 bp, Homo sapiens
ataaatttattccaaatgggctgaartaggttcaaaatgtcatcaagctta

SEQ ID NO: 3398 - DNA, 51 bp, Homo sapiens
ttgatcatatctattcacacagttaygaccacttctgtatacataaatata

SEQ ID NO: 3399 - DNA, 51 bp, Homo sapiens
cctgagctttttgttcagtaaatagyattggctagctctaccattgcctgg

SEQ ID NO: 3400 - DNA, 51 bp, Homo sapiens
acctagggagatcaggcatttccagytgactcacagtgggctatcttttaa

SEQ ID NO: 3401 - DNA, 51 bp, Homo sapiens
catttcctgcttcttgtttggactayctgctgcaatttgtttgtcatttag

SEQ ID NO: 3402 - DNA, 51 bp, Homo sapiens
gtaaatatgatatttgtagtatttcmaaagtagatatctgaaacggtattt

SEQ ID NO: 3403 - DNA, 51 bp, Homo sapiens
taaaagtctttactaaattgaaataygtcaatgttagagtgtagaagttta

SEQ ID NO: 3404 - DNA, 51 bp, Homo sapiens
gttgagcctaattgaagtttccctayatacagtaagttcagagaaacactc

SEQ ID NO: 3405 - DNA, 51 bp, Homo sapiens
agtactttattttctgagccgtgaamccttttctccctttgtctttgcacc

SEQ ID NO: 3406 - DNA, 51 bp, Homo sapiens
tagtctcctatgtttaacataggcaygagaagagaaagcaaaggagatcaa

SEQ ID NO: 3407 - DNA, 51 bp, Homo sapiens
tgttaaacataggagactatcaaaamaccattccatccacctgtgccttgg

SEQ ID NO: 3408 - DNA, 51 bp, Homo sapiens
aaagaaagtagaacaaggtacgagamaaattcaatatgagaatgatttttc

SEQ ID NO: 3409 - DNA, 51 bp, Homo sapiens
agttttcacctggtaccttaccatgracctctgacttttgttaaaggcttt

SEQ ID NO: 3410 - DNA, 51 bp, Homo sapiens
ttatgttattataccaaagtagatcmaagtattgttattcatcttaaggca

SEQ ID NO: 3411 - DNA, 51 bp, Homo sapiens
tttttattcctcttattaccatcaaytccactctattttttacaaaataag

SEQ ID NO: 3412 - DNA, 51 bp, Homo sapiens
tcatactgcttttaaataaacgtagrttggagtaagttctttttcatttgg

SEQ ID NO: 3413 - DNA, 51 bp, Homo sapiens
ttaaaaccaaacactatcttataccyaataaaaaataatatgcaaagtcca

SEQ ID NO: 3414 - DNA, 51 bp, Homo sapiens
gtgggataccaaccccgccagaaaascgttagagagaagcccttggtctct

SEQ ID NO: 3415 - DNA, 51 bp, Homo sapiens
agagattctcggatgtttatactaastacattagaatttgaggtttaagta

SEQ ID NO: 3416 - DNA, 51 bp, Homo sapiens
ttagaagaatgttcaacattgataaytgaaggtcaactccgttctctgggt

SEQ ID NO: 3417 - DNA, 51 bp, Homo sapiens
cagcacttctattatagcaacaacaytagctgtctctagttcctaaaataa

SEQ ID NO: 3418 - DNA, 51 bp, Homo sapiens
attgttgtagcaaatgggagaatgcratttgatttttcatcttatctccat

SEQ ID NO: 3419 - DNA, 51 bp, Homo sapiens
caattccctcttaatgacttagtaaytctcatcattctgaaattatcttga

SEQ ID NO: 3420 - DNA, 51 bp, Homo sapiens
aaaaaaaagacttgataatctaaacmaacataggaagtgttcatgtgttaa

SEQ ID NO: 3421 - DNA, 51 bp, Homo sapiens
tggccactaaggaaacacagtgacayattacaagatcaaacctttcctacc

SEQ ID NO: 3422 - DNA, 51 bp, Homo sapiens
attttgaaagactttcacagtgagartagaaggtagatttggaatcatgca

SEQ ID NO: 3423 - DNA, 51 bp, Homo sapiens
ctattaaaataatagaaacaattcaktaacttccagattcattggggttag

SEQ ID NO: 3424 - DNA, 51 bp, Homo sapiens
ttgatgatattgaaaatagggtcctraaaacctcgatttctgcttgttggt

SEQ ID NO: 3425 - DNA, 51 bp, Homo sapiens
gttgccttttgctctgaagacgatckgacagttctgatatgcgggtttatt

SEQ ID NO: 3426 - DNA, 51 bp, Homo sapiens
gtgtggggctttactaatatgtttargagacaggtattaaagttagtttca

SEQ ID NO: 3427 - DNA, 51 bp, Homo sapiens
cctgcaatgcccattagtgtccacawagattttactaaagctcacaaacaa

SEQ ID NO: 3428 - DNA, 51 bp, Homo sapiens
ttttccttctttaaggggtcatttcraggataaagtaggacaaccattgtc

SEQ ID NO: 3429 - DNA, 51 bp, Homo sapiens
gtggcagcctttctgtagttgaataygtatcaaagtgagggacaagttgtt

SEQ ID NO: 3430 - DNA, 51 bp, Homo sapiens
tgtcctcggtctgaaagatattactsaggattcctttcaaaagcttaggaa

SEQ ID NO: 3431 - DNA, 51 bp, Homo sapiens
actatccgtatgaattcctggatatyacaagtgcacttttctgaagttacc

SEQ ID NO: 3432 - DNA, 51 bp, Homo sapiens
atcaaggagaggaagttatccctgaycttggtaaaatccagaattacacca

SEQ ID NO: 3433 - DNA, 51 bp, Homo sapiens
gatcattcccctactaagatagaaamtgagaggtaaatgaataatcacttt

SEQ ID NO: 3434 - DNA, 51 bp, Homo sapiens
tatttagctttaaatgttataattayatctctgcttcttgttcaatcatct

SEQ ID NO: 3435 - DNA, 51 bp, Homo sapiens
tttgcttttcattttcaactactcaraatggaaattctctcccatcagaaa

SEQ ID NO: 3436 - DNA, 51 bp, Homo sapiens
tatgtttcagaatgtaggcatttttrtacttttgaaaagtaaaacagcata

SEQ ID NO: 3437 - DNA, 51 bp, Homo sapiens
attaccattgcttttctgttctaaakaaattaaacattagacagatagaaa

SEQ ID NO: 3438 - DNA, 51 bp, Homo sapiens
atgtacttggcttagcattttagcckatcaagatggtttagaaattctatt

SEQ ID NO: 3439 - DNA, 51 bp, Homo sapiens
ggaaagatgcatgtctaattcaacaytataaactccacaacctttagcata

SEQ ID NO: 3440 - DNA, 51 bp, Homo sapiens
cttaccatagttgattagcaatgtaycaatgaggaatttaatatagtcagt

SEQ ID NO: 3441 - DNA, 51 bp, Homo sapiens
tactatcccaccttcttctactttaycactatttcagtaccaatatcccat

SEQ ID NO: 3442 - DNA, 51 bp, Homo sapiens
tatctaagatggtgtaaaagtttgayctcaattttctgtgtgtgcatgtgc

SEQ ID NO: 3443 - DNA, 51 bp, Homo sapiens
aatgtattgcaccaggtactatgctrtatcttatatgatggttctttatga

SEQ ID NO: 3444 - DNA, 51 bp, Homo sapiens
ctgctctttagtcttagaataaatgragccttttcctagtaacaaaaatga

SEQ ID NO: 3445 - DNA, 51 bp, Homo sapiens
atacgagttggagatgttgagagtamaatttcctgatttctttttttttgg

SEQ ID NO: 3446 - DNA, 51 bp, Homo sapiens
gtttcctaggtatagaacatatcatyactgaagagagatagtttgacttct

SEQ ID NO: 3447 - DNA, 51 bp, Homo sapiens
agccagctgtatagctacattgtccrctattttttttggagcctgagtaat

SEQ ID NO: 3448 - DNA, 51 bp, Homo sapiens
cccgtggctctcaattgcagaaaggwatcgagctaaagagcagcttgggtg

SEQ ID NO: 3449 - DNA, 51 bp, Homo sapiens
aataacactggaatgaatcataatayatacaaaagataacgtgtattccta

SEQ ID NO: 3450 - DNA, 51 bp, Homo sapiens
gaagtcctgtaaagccctagtggaaragttagaaaagtacagtagtccccg

SEQ ID NO: 3451 - DNA, 51 bp, Homo sapiens
tggaaagtgtacctaaccttcgaacrctcattcacatggtatatgatcaag

SEQ ID NO: 3452 - DNA, 51 bp, Homo sapiens
aaatccttatttggataagcattacyagagtatggtagagggagaagaggt

SEQ ID NO: 3453 - DNA, 51 bp, Homo sapiens
taaattacttctttcagggctttaayagccaaaaatatctcattaattcaa

SEQ ID NO: 3454 - DNA, 51 bp, Homo sapiens
attttagcaatttatttggtccataygtggatagaaaatatcaagcacagg

SEQ ID NO: 3455 - DNA, 51 bp, Homo sapiens
tatttgtatatggggccaatagatcrctatgtaaaggcagttcactaaacc

SEQ ID NO: 3456 - DNA, 51 bp, Homo sapiens
aattgggtgaagtttactgatggaargggttatttcttacacattgcttca

SEQ ID NO: 3457 - DNA, 51 bp, Homo sapiens
aagtcaagaaaatatccttatctcaytccatctcaattttattccaaatat

SEQ ID NO: 3458 - DNA, 51 bp, Homo sapiens
tttaatatatattctgaaagcataasaaagggtggctaattaaaaaatata

SEQ ID NO: 3459 - DNA, 51 bp, Homo sapiens
aacaaacacagcagataggagagaarcaacgaagatataagaaacatggga

SEQ ID NO: 3460 - DNA, 51 bp, Homo sapiens
tgggaaaatttgttttccagtcagaygtttgtcaaggttaaagaaattcac

SEQ ID NO: 3461 - DNA, 51 bp, Homo sapiens
ggatacttgccttgtcaccttgacaycatacatatttggtaaagaaaattt

SEQ ID NO: 3462 - DNA, 51 bp, Homo sapiens
atttttagttatctgtggaaggatcratggcatcatatatctcatccacca

SEQ ID NO: 3463 - DNA, 51 bp, Homo sapiens
tcctaacttcaggctttcatcttaascaatagtttccaacacccccaaaag

SEQ ID NO: 3464 - DNA, 51 bp, Homo sapiens
aaaacatcttatttcataaaatctayctgctactatatggttcctacttta

SEQ ID NO: 3465 - DNA, 51 bp, Homo sapiens
tgcttgccacttcacatagtatcaasaaaacgaatgtattacccccaaatt

SEQ ID NO: 3466 - DNA, 51 bp, Homo sapiens
ctttgttgaatatgaagtttccttaycacattgcattcacattatccatca

SEQ ID NO: 3467 - DNA, 51 bp, Homo sapiens
aagccaaaagattggatacagctgakctaaagcaacaggttcatctactca

SEQ ID NO: 3468 - DNA, 51 bp, Homo sapiens
agtagtcagtcttatgtcagataaayagtatacctctagctcattattgaa

SEQ ID NO: 3469 - DNA, 51 bp, Homo sapiens
tcagtgagaaggagcaatgtaaataraaagttaaatagcatgaggtaaatg

SEQ ID NO: 3470 - DNA, 51 bp, Homo sapiens
atgggcaagattaactgatagacacrgagcatttatttgttcaaatgttga

SEQ ID NO: 3471 - DNA, 51 bp, Homo sapiens
tctgaaccaaagtggtcatcctgtcrcaatctgtaattttaccccatttta

SEQ ID NO: 3472 - DNA, 51 bp, Homo sapiens
gctaggacttgccaatgggtatagasgccaccagaaactggtgaactattt

SEQ ID NO: 3473 - DNA, 51 bp, Homo sapiens
gctttggatctaatattgactcccaygcctaaatccctttggagaactcct

SEQ ID NO: 3474 - DNA, 51 bp, Homo sapiens
gtgcttaaagcagcaacagcttaaawgagggacacttcagacaaggcccct

SEQ ID NO: 3475 - DNA, 51 bp, Homo sapiens
ttgaaccaagtttgaaaacgattgtyaaagaaagaggtattactgtaattc

SEQ ID NO: 3476 - DNA, 51 bp, Homo sapiens
gacaggtgcatgggggtccataatayactgttctctttacttatatatgtc

SEQ ID NO: 3477 - DNA, 51 bp, Homo sapiens
aaattttgggacagaggaatatccaytaaatgatccttccatgccctgctc

SEQ ID NO: 3478 - DNA, 51 bp, Homo sapiens
aatacctctgaagtttcaatgttgayatggcagagccacaagatgaaagca

SEQ ID NO: 3479 - DNA, 51 bp, Homo sapiens
tagatttcaaattagtggtatatacmggctacttgatatatattttaatgt

SEQ ID NO: 3480 - DNA, 51 bp, Homo sapiens
ccttactttaggtatctggatttcayctgccggttgtaaaagttactgtgc

SEQ ID NO: 3481 - DNA, 51 bp, Homo sapiens
agtcatcacagataacagacactaastggtacagatcagctgactagagaa

SEQ ID NO: 3482 - DNA, 51 bp, Homo sapiens
gtacacatcagaactcagaaggatawaattattcaaggcagagttaatgaa

SEQ ID NO: 3483 - DNA, 51 bp, Homo sapiens
cttttatttctatattacatttgtcrcacccctcagaaaatgtggacacta

SEQ ID NO: 3484 - DNA, 51 bp, Homo sapiens
gcaaacagttctgttattacttttcytgtacatctctgcttaaatttaagg

SEQ ID NO: 3485 - DNA, 51 bp, Homo sapiens
taaatttgaaattttcactgaacgasatatctgttgttaacattttaaaca

SEQ ID NO: 3486 - DNA, 51 bp, Homo sapiens
aaatatggttctatgtgtggaaaatwattaagcagtgatttaattattttg

SEQ ID NO: 3487 - DNA, 51 bp, Homo sapiens
ggcttaaattgtcaacatagcttctyaaaatatcgaatataccacaaggga

SEQ ID NO: 3488 - DNA, 51 bp, Homo sapiens
aatgtcactctgaaattcaccagtcrctttattcgtcctgctgaagcttca

SEQ ID NO: 3489 - DNA, 51 bp, Homo sapiens
gtgggagatcagataagcaagtatcragagattgaaatttaatgattacaa

SEQ ID NO: 3490 - DNA, 51 bp, Homo sapiens
cttttgcaggtgaatctcatcctgaytaatttcgcacaaaatgctcagctc

SEQ ID NO: 3491 - DNA, 51 bp, Homo sapiens
taccaaatggatacagtattacaatkattatgaaaacctatcccaaaattt

SEQ ID NO: 3492 - DNA, 51 bp, Homo sapiens
taatgctagaaaatctaaaaattcarcttgagacctagtgaacctgaactt

SEQ ID NO: 3493 - DNA, 51 bp, Homo sapiens
tttcctcagagcaaggcactagcgcygagtggagacatgtacctaaaattc

SEQ ID NO: 3494 - DNA, 51 bp, Homo sapiens
aggcacttgacagggacagatgaacragaatggagagctttgaaaagggtg

SEQ ID NO: 3495 - DNA, 51 bp, Homo sapiens
tctggcaacacctgtaaagggcaackgactgttccaagagggtagcttaag

SEQ ID NO: 3496 - DNA, 51 bp, Homo sapiens
gaaacttaagtgtttaaaattagaasagtaacattaaatcacccactcttt

SEQ ID NO: 3497 - DNA, 51 bp, Homo sapiens
aaaaataacagaacctaagtgatgamtaaaagaggccactgtgcaaatcat

SEQ ID NO: 3498 - DNA, 51 bp, Homo sapiens
ataaaaaaaactcatactttcttgarcatactgattattgctcacttttca

SEQ ID NO: 3499 - DNA, 51 bp, Homo sapiens
ttattagaatttttgctgcattgcayggttgacttcaatttgctaaatgtt

SEQ ID NO: 3500 - DNA, 51 bp, Homo sapiens
gccgtacaatagaacaccagatagaygttttagatttttgactctggtccc

SEQ ID NO: 3501 - DNA, 51 bp, Homo sapiens
gaaccaagaacctacattgggtaaargacgccctcttcactaaatagtatt

SEQ ID NO: 3502 - DNA, 51 bp, Homo sapiens
taaagaactacctaagactgcgtaaygtgtaaaggaaagaagcttaattga

SEQ ID NO: 3503 - DNA, 51 bp, Homo sapiens
gcacacataaaatattttagttatgyaatgctaccacacatcagcatctta

SEQ ID NO: 3504 - DNA, 51 bp, Homo sapiens
agcatcaattttcttttaaattcaayagttattcaaattgatcgaaaatta

SEQ ID NO: 3505 - DNA, 51 bp, Homo sapiens
ttcttttaagtatcctagcatctcartgaacaggcattactatttccaccc

SEQ ID NO: 3506 - DNA, 51 bp, Homo sapiens
agattgtacacatgtattccaacackgagtataatagcctccaaagtcctc

SEQ ID NO: 3507 - DNA, 51 bp, Homo sapiens
agccttctgggcctacttctgtcccrtcccaaatcacactacggtgtcatt

SEQ ID NO: 3508 - DNA, 51 bp, Homo sapiens
aatgagttatgtaatgagggaaactmagtattacattaacacctcaaaaga

SEQ ID NO: 3509 - DNA, 51 bp, Homo sapiens
gcttgagaagggccaggctaatggaycagaaggagtagtaccatgagaaac

SEQ ID NO: 3510 - DNA, 51 bp, Homo sapiens
aggaccacagcgtcatatgaggtttrggtcctctttcaaacttacatggtt

SEQ ID NO: 3511 - DNA, 51 bp, Homo sapiens
tagaagtcagaacctcttgttgaccrggaatagactgtagaagtgtgctgt

SEQ ID NO: 3512 - DNA, 51 bp, Homo sapiens
tccaagaaattcagaattactctaayatttacgaatgtgatttaagaactc

SEQ ID NO: 3513 - DNA, 51 bp, Homo sapiens
agccttacttttagtacagttagaaytgagaatgcaacttgaacaagagac

SEQ ID NO: 3514 - DNA, 51 bp, Homo sapiens
attcaggttggaccttcgttatcatragcataatagccatacggatctact

SEQ ID NO: 3515 - DNA, 51 bp, Homo sapiens
tcatttctggcaaattgagtcagcastaacagctaatgacccagatggctg

SEQ ID NO: 3516 - DNA, 51 bp, Homo sapiens
atccaacagacctggtgctctagtgycaagttatacatgggacagttgctg

SEQ ID NO: 3517 - DNA, 51 bp, Homo sapiens
ttttctggcagaatgggcaaagcgcratgtaatttgagctctcatgtatga

SEQ ID NO: 3518 - DNA, 51 bp, Homo sapiens
taatcaactctgattactttgaggakctaaggttttggatacattatggag

SEQ ID NO: 3519 - DNA, 51 bp, Homo sapiens
tctttgtttgataatttgttcttaayacagctagcagagttcaattttcac

SEQ ID NO: 3520 - DNA, 51 bp, Homo sapiens
agaagggaaggcaatgaaaacactckatgtctcttctattagaggtgctgc

SEQ ID NO: 3521 - DNA, 51 bp, Homo sapiens
ttactttcattagagaatatgggtgytagacatttgacttgatattagatt

SEQ ID NO: 3522 - DNA, 51 bp, Homo sapiens
atttcaggcaagcaaatgcttatgcrgaacttaggtctttgactctacctg

SEQ ID NO: 3523 - DNA, 51 bp, Homo sapiens
gcaagcagctgtttaaatatgcaagrcactatccggaaagagaaaaagggc

SEQ ID NO: 3524 - DNA, 51 bp, Homo sapiens
acctaaccccaagctgcaaagctcasaactccaaaaatgcccacttctttc

SEQ ID NO: 3525 - DNA, 51 bp, Homo sapiens
gataaattgtagagagattggatgaraacagtcttgggcagaaaaaagtat

SEQ ID NO: 3526 - DNA, 51 bp, Homo sapiens
agaaatatcgatacactttctctaayaacctctgcaaattttgaatacatc

SEQ ID NO: 3527 - DNA, 51 bp, Homo sapiens
caagcaagccgtcagcctcactagartctaaaatggtaaaggttctataaa

SEQ ID NO: 3528 - DNA, 51 bp, Homo sapiens
ccatgtgaggcatagacttccgttcyattaaagccagagtctctaggaaca

SEQ ID NO: 3529 - DNA, 51 bp, Homo sapiens
aatggtcttttattacagaatcatamggtaactgatgaggagactggattt

SEQ ID NO: 3530 - DNA, 51 bp, Homo sapiens
cagctttgcaccaccgtgctttgaaygtatactttgctttctaccaatact

SEQ ID NO: 3531 - DNA, 51 bp, Homo sapiens
ttgaagagggctagaagtatagagaytcagtaacgtgtgattggtttttgt

SEQ ID NO: 3532 - DNA, 51 bp, Homo sapiens
aaacctatttccagattctccattcrttcttaagtgcaaaagacacagaag

SEQ ID NO: 3533 - DNA, 51 bp, Homo sapiens
agaggctcagtattccttgtgaagarccgtcatttaaaaggaagatctgtc

SEQ ID NO: 3534 - DNA, 51 bp, Homo sapiens
tatgctgtttactgttggccgtagckttaagtgtcagaagctaaaatttct

SEQ ID NO: 3535 - DNA, 51 bp, Homo sapiens
ccagctgggatagatgcttcactaaragacatgtgtgcactttgtcctgat

SEQ ID NO: 3536 - DNA, 51 bp, Homo sapiens
acaagacttgtttccccgaggcatcrgttactatcaccaacagtctctatt

SEQ ID NO: 3537 - DNA, 51 bp, Homo sapiens
tgtcacatttctaatagcctttaagyctgaataaggacgagaggactgtga

SEQ ID NO: 3538 - DNA, 51 bp, Homo sapiens
ccaaaccacgtaccatggtagtcaawgactttcctatttggctcttggcta

SEQ ID NO: 3539 - DNA, 51 bp, Homo sapiens
atcacaaaggtatagttaaaatatgwaatgcatttggaatagtgcctagca

SEQ ID NO: 3540 - DNA, 51 bp, Homo sapiens
tgacctaatgtgtaccttacgcctamgtacaatggcataagatatatttag

SEQ ID NO: 3541 - DNA, 51 bp, Homo sapiens
catattccataaaaccatagggcccmataaatggtcaaatgtatttaaatg

SEQ ID NO: 3542 - DNA, 51 bp, Homo sapiens
gccaccagggacatatgctctggtawctataaacagaccagagataaagaa

SEQ ID NO: 3543 - DNA, 51 bp, Homo sapiens
cactgggttccatgcaccccaattaygctggctctgaggccaacacagcac

SEQ ID NO: 3544 - DNA, 51 bp, Homo sapiens
ctataaaatatcttcatccttaaaamtaagtgttagactagatgactttta

SEQ ID NO: 3545 - DNA, 51 bp, Homo sapiens
gaaaaagtgccataatcagatcagamattatgacaacattctagaaaacca

SEQ ID NO: 3546 - DNA, 51 bp, Homo sapiens
gaatatctaagtgtgaggtgcctccragcataaagagaaaataatttaccc

SEQ ID NO: 3547 - DNA, 51 bp, Homo sapiens
tattcatcgaatacctcatatatacyagccattcaagcacatagtacttga

SEQ ID NO: 3548 - DNA, 51 bp, Homo sapiens
ccaccattttaccatctatcagctaygccatctttgaagttacttgctctc

SEQ ID NO: 3549 - DNA, 51 bp, Homo sapiens
atgatgtagctctttcttacgttaawcacctaatcttgtgccactttctcc

SEQ ID NO: 3550 - DNA, 51 bp, Homo sapiens
gagctccttatgtcttccgagttaaycggtgtgaaggcagtggtggtgtaa

SEQ ID NO: 3551 - DNA, 51 bp, Homo sapiens
tcacctcaagcttccttaatgacaaytcttatctactaaacagaacctaag

SEQ ID NO: 3552 - DNA, 51 bp, Homo sapiens
acatgaagtagtaatgtttcttccasaatagttagttgtgtttcattgctt

SEQ ID NO: 3553 - DNA, 51 bp, Homo sapiens
atgatttgaagaaatgagagacagakgaggttaacacaccaaggaaagaga

SEQ ID NO: 3554 - DNA, 51 bp, Homo sapiens
tactagaggactgttgcatatagacscagtagtcatgtcttcaattctttt

SEQ ID NO: 3555 - DNA, 51 bp, Homo sapiens
aagtctttcccttgtgtagagtagaycataggtgctcaaattaagttgaat

SEQ ID NO: 3556 - DNA, 51 bp, Homo sapiens
tgcgttgtagaattacaggctatgayagtcagaaagaagggggtgagggat

SEQ ID NO: 3557 - DNA, 51 bp, Homo sapiens
gtgacagccatattgatcctgaggascaaaaccttaagtcgtaaatatttt

SEQ ID NO: 3558 - DNA, 51 bp, Homo sapiens
gcagaaatgtgctaaaataggtttaratgttctactcttcaaatagctggt

SEQ ID NO: 3559 - DNA, 51 bp, Homo sapiens
ccttttcctgagaatcattggtgcastatactctgatttatttttcagttt

SEQ ID NO: 3560 - DNA, 51 bp, Homo sapiens
ggaacatgggttctatttgagagatyaattatttaaggcaagtggcaggaa

SEQ ID NO: 3561 - DNA, 51 bp, Homo sapiens
tcctggtcttgattgttcatgtagayagaatgataactattgaaactgtcc

SEQ ID NO: 3562 - DNA, 51 bp, Homo sapiens
taaagtttctcttgcataagctacaygtataaggctgctcacctgtgtgag

SEQ ID NO: 3563 - DNA, 51 bp, Homo sapiens
ctgcacaagacaggtagactcagaawtgtctccgcaatctggggtagagag

SEQ ID NO: 3564 - DNA, 51 bp, Homo sapiens
agactatggtctcaaaaccaggagasatgattaaatttaaggtaacaggct

SEQ ID NO: 3565 - DNA, 51 bp, Homo sapiens
attctcgatcatttctctgtaaaacyaggtttctagccagggcccatgcct

SEQ ID NO: 3566 - DNA, 51 bp, Homo sapiens
gttgttggtttttagcagactggatyacctacttaactgataaaagactgc

SEQ ID NO: 3567 - DNA, 51 bp, Homo sapiens
tctaaatccaaatagctgacttataratggccctttggaacacaacccatt

SEQ ID NO: 3568 - DNA, 51 bp, Homo sapiens
actacacacaggtcactgtgctaagyagtgaagtcctcatggattgctgtg

SEQ ID NO: 3569 - DNA, 51 bp, Homo sapiens
ataaatgaaatttaggaaaatgccakaactagaatcttgactgaggaaaga

SEQ ID NO: 3570 - DNA, 51 bp, Homo sapiens
tctattttctgttttatcaccataaytgtcacttgtcttaattcctagtaa

SEQ ID NO: 3571 - DNA, 51 bp, Homo sapiens
atggaattctatcggacaatgtagaytaacagttttttgaggggatcacca

SEQ ID NO: 3572 - DNA, 51 bp, Homo sapiens
agaatgaatgagtagttggatctaakaaatacattaaagagatagtatatc

SEQ ID NO: 3573 - DNA, 51 bp, Homo sapiens
aaagctttacttacttctcaaatgakataaaaggttcaaatcctcttttgg

SEQ ID NO: 3574 - DNA, 51 bp, Homo sapiens
gggaatagtggtgatagtctgactgkaatccccatgggcctgtggtcgtgg

SEQ ID NO: 3575 - DNA, 51 bp, Homo sapiens
cctataaatattttttgtttaatccyaattcttcatattaggagacaaaga

SEQ ID NO: 3576 - DNA, 51 bp, Homo sapiens
gtaagatgtgtggaggaataaagaaytaaggtcatgaattgagttactcta

SEQ ID NO: 3577 - DNA, 51 bp, Homo sapiens
gagtgctcataagtgcatgcaaagaygttacaagtaattttaccagttgct

SEQ ID NO: 3578 - DNA, 51 bp, Homo sapiens
tccttgcaaatgatgactagttgatmagtgaaaagagtttagagaattgag

SEQ ID NO: 3579 - DNA, 51 bp, Homo sapiens
tacatatctctatctcccttatcacrattatagtaatttaatgtaaccctg

SEQ ID NO: 3580 - DNA, 51 bp, Homo sapiens
taaatgttattcaaatcattttatargtaaactcaagagcagccctgtgct

SEQ ID NO: 3581 - DNA, 51 bp, Homo sapiens
tacaattccactcctagatatatgcscaagaggattgaaaacagagattcg

SEQ ID NO: 3582 - DNA, 51 bp, Homo sapiens
tctcttggttttaatcttgggtctayaaatctgtgtttgagaagtagcata

SEQ ID NO: 3583 - DNA, 51 bp, Homo sapiens
gcatatgctttgttggcatttacctrcttcaaaacatggaaagcttttcct

SEQ ID NO: 3584 - DNA, 51 bp, Homo sapiens
gaacaaaaatatgatacagatcacasatgacagagcaagcattaaaacagt

SEQ ID NO: 3585 - DNA, 51 bp, Homo sapiens
ctatagggcaatcatcgattccgaayaacttgattgaaaaaaaactcatcg

SEQ ID NO: 3586 - DNA, 51 bp, Homo sapiens
ctaatagagaccattctcctgaacaktaaaaattggatccaggccagatac

SEQ ID NO: 3587 - DNA, 51 bp, Homo sapiens
tgaaaaattacactgccttgaagtaygctaaactataccaactgtgtacta

SEQ ID NO: 3588 - DNA, 51 bp, Homo sapiens
aattttctctgccaaattaagctgayagagattggccactttcaaccagtc

SEQ ID NO: 3589 - DNA, 51 bp, Homo sapiens
caggcgcgccgccgggttgagtctcscgaacaaaatgaggccagagtgcct

SEQ ID NO: 3590 - DNA, 51 bp, Homo sapiens
aaccccttcaggaattaagcctgagkcagggtcctctcagatgcaatgcct

SEQ ID NO: 3591 - DNA, 51 bp, Homo sapiens
catccattccccactcacatccaaaygtaggaatacttgagatctcagttt

SEQ ID NO: 3592 - DNA, 51 bp, Homo sapiens
actaaaataagcccgttatatatcawcaatgagagtcaaactaaattactc

SEQ ID NO: 3593 - DNA, 51 bp, Homo sapiens
gccttaaatttccaagtaggggctakacataatcagcagactggctcacta

SEQ ID NO: 3594 - DNA, 51 bp, Homo sapiens
atggtcacattacatgcttattcaamgtcagatatctcagattaacaaggc

SEQ ID NO: 3595 - DNA, 51 bp, Homo sapiens
tgtcagttttgtttcattgtactgasaaccttagctggcatcatggacctt

SEQ ID NO: 3596 - DNA, 51 bp, Homo sapiens
attgggctagtcttaatttagggaargtagctctggtgattgagaagacat

SEQ ID NO: 3597 - DNA, 51 bp, Homo sapiens
agactcagattaatacaccttaatartaagttgagaggttgtgttcagtct

SEQ ID NO: 3598 - DNA, 51 bp, Homo sapiens
tagacaataagaaggattcctggacrattcagaaccccagcgttctcagga

SEQ ID NO: 3599 - DNA, 51 bp, Homo sapiens
ttttgtttttctaaaaatggtatcaycctatgtacattcctcagcactcgg

SEQ ID NO: 3600 - DNA, 51 bp, Homo sapiens
actgcaatttttttaaaagctcatargctagaacaagagacgtaggtaggt

SEQ ID NO: 3601 - DNA, 51 bp, Homo sapiens
agaaaactgtcatgtcaactgtgtcrccctttaccaagcaagccaacctca

SEQ ID NO: 3602 - DNA, 51 bp, Homo sapiens
aatgtcacagactcttaactgtctargctgacaagactcagtgtcccccct

SEQ ID NO: 3603 - DNA, 51 bp, Homo sapiens
tcttcaggactccttactataaaaarccttatctacgttggaaatgtgatg

SEQ ID NO: 3604 - DNA, 51 bp, Homo sapiens
gttaaattaaaaaaccaagtacactsaaatatctaagtcctaaatgagtcc

SEQ ID NO: 3605 - DNA, 51 bp, Homo sapiens
ggtctcattatgttcttggcattgawatcctacctgatgagtttgggcact

SEQ ID NO: 3606 - DNA, 51 bp, Homo sapiens
gttttgaggattgatatgatatttcygaaaacaactagcaaagatatagct

SEQ ID NO: 3607 - DNA, 51 bp, Homo sapiens
agatttatataatatgacccaactaygtgaaaacactgagagagagagaca

SEQ ID NO: 3608 - DNA, 51 bp, Homo sapiens
tatcaaatcactaaggtggtcgagarccatatttaaaagattagcactgtt

SEQ ID NO: 3609 - DNA, 51 bp, Homo sapiens
gggtcaggatggcacttctctgccamctggatatgttctgtgcatgtctct

SEQ ID NO: 3610 - DNA, 51 bp, Homo sapiens
caattaaatgctaaataaaaattggycattattgttactgataggctaccc

SEQ ID NO: 3611 - DNA, 51 bp, Homo sapiens
ttgagaaggatgaccaaataattcaraatgcacatactcttagagtacagt

SEQ ID NO: 3612 - DNA, 51 bp, Homo sapiens
caatgctacactcactggagatatcyaagtcctgcagtaaatgcattgcct

SEQ ID NO: 3613 - DNA, 51 bp, Homo sapiens
aaactacatctcctagagtttaagtractggtccaaaagattgcgtagctg

SEQ ID NO: 3614 - DNA, 51 bp, Homo sapiens
gggcccactgtaaaaatttatacacrggcatgtccagctgcagtcatgagc

SEQ ID NO: 3615 - DNA, 51 bp, Homo sapiens
acaatttttattgactatccactaartcttatgtactgggtatattaaact

SEQ ID NO: 3616 - DNA, 51 bp, Homo sapiens
tcacaattcagaaagtttgacaaatraataaatgacagtttggctttctac

SEQ ID NO: 3617 - DNA, 51 bp, Homo sapiens
aataaatccaaatacccttatagtargtacaccatttataacagggaagtt

SEQ ID NO: 3618 - DNA, 51 bp, Homo sapiens
ttgcgacttctattcctaagctgaartaaagaaactccctgcaggagtcag

SEQ ID NO: 3619 - DNA, 51 bp, Homo sapiens
gaccatactttcctggacttgtttayctgtagcctgtctaattctgaccac

SEQ ID NO: 3620 - DNA, 51 bp, Homo sapiens
ttctcccacttgttcttcattcctayatttattcaacttcccttataatcc

SEQ ID NO: 3621 - DNA, 51 bp, Homo sapiens
aaatactgtaagggagaaagcaagaygcactattttgaaaatgaaaaatag

SEQ ID NO: 3622 - DNA, 51 bp, Homo sapiens
cacttttgttcttctttgaaaaacaycagtgatctttggaaaacggctttt

SEQ ID NO: 3623 - DNA, 51 bp, Homo sapiens
ggaatggagccctctgctttcactaygcataagtcaattagaacatgctga

SEQ ID NO: 3624 - DNA, 51 bp, Homo sapiens
atatcaaatgccttacagatattgargttccatattctctttttccccatc

SEQ ID NO: 3625 - DNA, 51 bp, Homo sapiens
catctaatagaatggcaacatttaakatttctgatgtaactaactgttgaa

SEQ ID NO: 3626 - DNA, 51 bp, Homo sapiens
atgtgtagcactatatgaatgtaagytggatgtactattttatttcatatc

SEQ ID NO: 3627 - DNA, 51 bp, Homo sapiens
acttcccaatgattaagataccaaaygcttgaggactagtagcatttgtaa

SEQ ID NO: 3628 - DNA, 51 bp, Homo sapiens
tgttaaacaaatttctaaaaactgayagagtttgtgttaaaacatattact

SEQ ID NO: 3629 - DNA, 51 bp, Homo sapiens
ttgaaataatatgagcttttggacastatgtattcagtacagactttcaga

SEQ ID NO: 3630 - DNA, 51 bp, Homo sapiens
ctagcatactcgtgataatgatgtargactactgccatttctttagaatgc

SEQ ID NO: 3631 - DNA, 51 bp, Homo sapiens
gtatcgccacagacccagtgctagaygtagatcccaatcacacaggaccag

SEQ ID NO: 3632 - DNA, 51 bp, Homo sapiens
tgaagaggaatgctgtgaatgagaaragactgtaattcaaagggagagcat

SEQ ID NO: 3633 - DNA, 51 bp, Homo sapiens
ttgatgatgatataaaggctaaaagrataggaattcaaatcagctacacaa

SEQ ID NO: 3634 - DNA, 51 bp, Homo sapiens
actctgccatcattaatagattaagrccaatattgcaagagtggttttatt

SEQ ID NO: 3635 - DNA, 51 bp, Homo sapiens
tttacatttgtaatgaattattgagrgttgttcattggaaaacagaagcta

SEQ ID NO: 3636 - DNA, 51 bp, Homo sapiens
gttacatgggaagtgaggatagtgaygaactggggtgttgactcacctagc

SEQ ID NO: 3637 - DNA, 51 bp, Homo sapiens
ggctgttctgggaattcagaggtgasaagttgaaggacagtggggacacac

SEQ ID NO: 3638 - DNA, 51 bp, Homo sapiens
atattacaaatatgtgtagaacatcrccttttctttattgaccatggattt

SEQ ID NO: 3639 - DNA, 51 bp, Homo sapiens
gtttatagaactaagaattcgtaatraaacaggaaatatgaagagtaatat

SEQ ID NO: 3640 - DNA, 51 bp, Homo sapiens
cctccttgtccacttacggtgactcratacattcaagttccacccacagga

SEQ ID NO: 3641 - DNA, 51 bp, Homo sapiens
caaaagattgcttttgaaaaattacygcttattgacaaatgtacctagtca

SEQ ID NO: 3642 - DNA, 51 bp, Homo sapiens
ctaagcagaaagtctttgaaatgtaragtggagtttttagtaggtttatga

SEQ ID NO: 3643 - DNA, 51 bp, Homo sapiens
actttctgcttaattcaggagcttasaggattcttcaaagagtgtgtaagc

SEQ ID NO: 3644 - DNA, 51 bp, Homo sapiens
gcataaagaaaggctccatttacacratgtggaagaaatcaactttacctt

SEQ ID NO: 3645 - DNA, 51 bp, Homo sapiens
actggttatttcttcctgttcacatratattgttcatttgcttttttgaat

SEQ ID NO: 3646 - DNA, 51 bp, Homo sapiens
caaagcttacctaaccaagaagggcrcaatccacaatgcacacttgaggtt

SEQ ID NO: 3647 - DNA, 51 bp, Homo sapiens
agaggtgacatgcctgttgtcatggwacttagcaaagaaaaagcttagctc

SEQ ID NO: 3648 - DNA, 51 bp, Homo sapiens
cttttccataaaccttctagtcccamaaactgctagattatcaactcatac

SEQ ID NO: 3649 - DNA, 51 bp, Homo sapiens
ctggaattctaaactacttggaaacyacatgatctttaaacaaccttgacc

SEQ ID NO: 3650 - DNA, 51 bp, Homo sapiens
attccaaagccttcagtatagagtamaattttaatgcatatactttagttg

SEQ ID NO: 3651 - DNA, 51 bp, Homo sapiens
atgctcaaatatggatctgcccctayaatgtgttccctaggcatgaaatga

SEQ ID NO: 3652 - DNA, 51 bp, Homo sapiens
aactcccactcaagtgcaaatatgasaaaagaagatgtgggactgcaagat

SEQ ID NO: 3653 - DNA, 51 bp, Homo sapiens
tggcttctacagaaacttataaacaraatggagtgagagatctttagagat

SEQ ID NO: 3654 - DNA, 51 bp, Homo sapiens
gaaaagacagtccaaggcttatcgaractcataggctaaaatccaagggga

SEQ ID NO: 3655 - DNA, 51 bp, Homo sapiens
cagagggctggtggtctgagtgaagrataactgactgcaggcgtaggcgat

SEQ ID NO: 3656 - DNA, 51 bp, Homo sapiens
gaaaggttgactgagatgttccctawgactcattatctatgatttgtctac

SEQ ID NO: 3657 - DNA, 51 bp, Homo sapiens
aaatgtagaaatgcaggaaatttaayagtaaccaagactgacatcttctgc

SEQ ID NO: 3658 - DNA, 51 bp, Homo sapiens
agtttattctcattttagaactcaargtgattaggcaaattacctaaactc

SEQ ID NO: 3659 - DNA, 51 bp, Homo sapiens
gaagaacatcagggaaaactgcccaratgtaatatgctatagaaatattat

SEQ ID NO: 3660 - DNA, 51 bp, Homo sapiens
agacaactcaagacagtaaaagaagwgtaacaaaccagatgtgccctatga

SEQ ID NO: 3661 - DNA, 51 bp, Homo sapiens
ttactcacatgtgttaccagaactcragcacacttaagatctatcttatct

SEQ ID NO: 3662 - DNA, 51 bp, Homo sapiens
gaacttgataaagaatccaggaaacrgcttcctcctcaatcttagcagtaa

SEQ ID NO: 3663 - DNA, 51 bp, Homo sapiens
cgtctgttgttttcccaataagatgrattccactatatggtgaaatgtggt

SEQ ID NO: 3664 - DNA, 51 bp, Homo sapiens
tgtctaatctatagtgaaggattgargcattttttcctgttatttctaaga

SEQ ID NO: 3665 - DNA, 51 bp, Homo sapiens
aaacaaatgagtacataattcacaaytggagcttaggaaaaattcccagta

SEQ ID NO: 3666 - DNA, 51 bp, Homo sapiens
ctgtaccagaagataaatgttgaaaytaagcaagaactgtattttactcaa

SEQ ID NO: 3667 - DNA, 51 bp, Homo sapiens
ctcaagaattattagggaccagaaarcgattttaattatctgcatttcatc

SEQ ID NO: 3668 - DNA, 51 bp, Homo sapiens
actgatggacacattgttgctagaayattctcctaattaaatttgtttcga

SEQ ID NO: 3669 - DNA, 51 bp, Homo sapiens
cttttatatgattaaacaaattaaamtgataccacttcatcgggttgtttt

SEQ ID NO: 3670 - DNA, 51 bp, Homo sapiens
agataccctgaggctctgcaacatawccattcagaatatgggagctactta

SEQ ID NO: 3671 - DNA, 51 bp, Homo sapiens
aatattttagttcaggcgaagcggaragacaaattatttgtaaaaaatgtt

SEQ ID NO: 3672 - DNA, 51 bp, Homo sapiens
ctttatcactgagaaacaaccagacygttagaagtgttgaaggcatatgta

SEQ ID NO: 3673 - DNA, 51 bp, Homo sapiens
aagtaatttatgatgaagattttaaygggaaaacagtagataattgcatgt

SEQ ID NO: 3674 - DNA, 51 bp, Homo sapiens
ggcttctcataatggctttaacctcsagtagattttaaaagctatcatgca

SEQ ID NO: 3675 - DNA, 51 bp, Homo sapiens
aacaaaactattagataatctatacygtaagtgtttagttttccctagtta

SEQ ID NO: 3676 - DNA, 51 bp, Homo sapiens
gccagggctggtactcaaaacccaargaggcataagccctcttattttttt

SEQ ID NO: 3677 - DNA, 51 bp, Homo sapiens
aacactgagttagttactgttgctaycaaacattcaacctaccagcaacag

SEQ ID NO: 3678 - DNA, 51 bp, Homo sapiens
ttctccccacaattattaaacctgamatagaaagaattcacttcgttttaa

SEQ ID NO: 3679 - DNA, 51 bp, Homo sapiens
gaagctttgtttgattattccaatamacaatgtctgttctttccttttata

SEQ ID NO: 3680 - DNA, 51 bp, Homo sapiens
gtaatatgaaatgctggggtagtcayactagaagggaactttcaagtttca

SEQ ID NO: 3681 - DNA, 51 bp, Homo sapiens
caaatggcatgacgaaggaaagagasatatacagcaaattctctgagccct

SEQ ID NO: 3682 - DNA, 51 bp, Homo sapiens
atatgagttcttgagataattggaaracatggtatttctattgtcccacct

SEQ ID NO: 3683 - DNA, 51 bp, Homo sapiens
catcttacggaagccaaagcaaagasgatggctatttttaacttgaggcag

SEQ ID NO: 3684 - DNA, 51 bp, Homo sapiens
tgaaactgtatgcacgactggtaacyggcaaaggattgagggcatgtgaga

SEQ ID NO: 3685 - DNA, 51 bp, Homo sapiens
atggggctctggcctctcctaccacrcataacgccaaggggagactcgtct

SEQ ID NO: 3686 - DNA, 51 bp, Homo sapiens
gaactgtgctacaaacagagctaaamcatggtagagggactttgaagctac

SEQ ID NO: 3687 - DNA, 51 bp, Homo sapiens
taaaacacttagaagagtgcctaggwcattagtaaacagtcaataaatgtt

SEQ ID NO: 3688 - DNA, 51 bp, Homo sapiens
ctggaagttatcttccgtatttgcasaagccaatagaaacaactcatttag

SEQ ID NO: 3689 - DNA, 51 bp, Homo sapiens
taaatgtcttggtcagaaacctccayggggaattggaatgagtggcagttt

SEQ ID NO: 3690 - DNA, 51 bp, Homo sapiens
ataaatacttagttgtatctatgcawgccaaattattggcatcacctggtt

SEQ ID NO: 3691 - DNA, 51 bp, Homo sapiens
tggactgtgtagtttacatatacaayttagttttatcaaaatcttactcga

SEQ ID NO: 3692 - DNA, 51 bp, Homo sapiens
aaatgttgtgaagagtcaatgtaaargtaatcataaaagtaatataaacta

SEQ ID NO: 3693 - DNA, 51 bp, Homo sapiens
caacatttcctttctcttcattttcyctctaatttagacctaaaactttgg

SEQ ID NO: 3694 - DNA, 51 bp, Homo sapiens
aaggaattgagaatatattctgagayaatcctccatgaattgtcttcgagt

SEQ ID NO: 3695 - DNA, 51 bp, Homo sapiens
agactatgaggtgagatttgcacacrcctgttttctaaagcctaacttttg

SEQ ID NO: 3696 - DNA, 51 bp, Homo sapiens
ataatagctgtggctgtacaagtcayctatgaaactgttctctcataggtg

SEQ ID NO: 3697 - DNA, 51 bp, Homo sapiens
cagaaagctctttgttgccgaaggamgtttctgaatagcagaaaatagcct

SEQ ID NO: 3698 - DNA, 51 bp, Homo sapiens
agggaaagcttctccgtgaaatcgaygagctggtgttcagaaaatgagtaa

SEQ ID NO: 3699 - DNA, 51 bp, Homo sapiens
tttggttacttagaaaaaaatcagaygtaaatagtgtactttgttcttctg

SEQ ID NO: 3700 - DNA, 51 bp, Homo sapiens
tcctgtcatgtcacatgcatttctaygtcgattttaacataatcacgtgtt

SEQ ID NO: 3701 - DNA, 51 bp, Homo sapiens
ccaaatggacaggggcttgtgtactyagaacaattaggccatctttctttt

SEQ ID NO: 3702 - DNA, 51 bp, Homo sapiens
ctccttgcctataagttcttacttayccatactgtctgtatttagagttga

SEQ ID NO: 3703 - DNA, 51 bp, Homo sapiens
gctatgctacctttggcacctccaayagttttgctccactgaccatgcata

SEQ ID NO: 3704 - DNA, 51 bp, Homo sapiens
gtgccaaaggtagcatagctgaaaamacaggtatctttgggtaaatttagt

SEQ ID NO: 3705 - DNA, 51 bp, Homo sapiens
tctacccaaaacaattgattattgaraataggactctgctcatcctgctga

SEQ ID NO: 3706 - DNA, 51 bp, Homo sapiens
ctccttcactgttcctacagcctacrccttttggaaacacttggtacctca

SEQ ID NO: 3707 - DNA, 51 bp, Homo sapiens
atacctttcttctgctcatgctaacrctctcgataaaacccgttgactttg

SEQ ID NO: 3708 - DNA, 51 bp, Homo sapiens
tccattttatgctaacctagaataasgaatgtttgccgcacttaaattgat

SEQ ID NO: 3709 - DNA, 51 bp, Homo sapiens
catccctcctctgacttaccggatayactacaccactttataaaatagttg

SEQ ID NO: 3710 - DNA, 51 bp, Homo sapiens
gtgagtaacccaataaaccatttccraccgttatcattctaatgtcaattg

SEQ ID NO: 3711 - DNA, 51 bp, Homo sapiens
tctgaattcctgttccacaaaagctrggagtaataataaatgtttattgtt

SEQ ID NO: 3712 - DNA, 51 bp, Homo sapiens
ggcaaaacatattatacttaaggcaytgcccctattttcctgataattgcg

SEQ ID NO: 3713 - DNA, 51 bp, Homo sapiens
ggtttatcaagataaaattattatamcctaaaatgcacaaatcttaatggc

SEQ ID NO: 3714 - DNA, 51 bp, Homo sapiens
aagtctaaaatctgtagtagtatggkcaggtagaacatgaacttaactttc

SEQ ID NO: 3715 - DNA, 51 bp, Homo sapiens
ttggcattctttggtgtacattttcrcattcacaaatataaacctatcatt

SEQ ID NO: 3716 - DNA, 51 bp, Homo sapiens
caataaaatatgaagatagaatataygtaaagttagatttaaatgcactaa

SEQ ID NO: 3717 - DNA, 51 bp, Homo sapiens
attgtacaactttcttccaggaacakcggaacagtaatttacagcatggat

SEQ ID NO: 3718 - DNA, 51 bp, Homo sapiens
caacttattcaaggcatatttattayattatctccagctactatatggctc

SEQ ID NO: 3719 - DNA, 51 bp, Homo sapiens
ataacattttgcatacacttaaacarcatatactagtacttatttcctcac

SEQ ID NO: 3720 - DNA, 51 bp, Homo sapiens
tatattgacaatgtgggcaataaccsaaaactttagtgaggaaataagtac

SEQ ID NO: 3721 - DNA, 51 bp, Homo sapiens
gctaaatgcacatggttcctccgaarataatagaaccctggcatttaggaa

SEQ ID NO: 3722 - DNA, 51 bp, Homo sapiens
agggtctgatgtttacacaaagccasctgaggttagttcttcatataattc

SEQ ID NO: 3723 - DNA, 51 bp, Homo sapiens
gcaattcagaagcttactgataagasagtctctggctaatgcacattgatc

SEQ ID NO: 3724 - DNA, 51 bp, Homo sapiens
gggaaagtttgctgggaagatgacartaagtaacaatgaatgtttacgaca

SEQ ID NO: 3725 - DNA, 51 bp, Homo sapiens
aagcatagtccaaaaggctggaacamaatcttggtagtaagcactctgcaa

SEQ ID NO: 3726 - DNA, 51 bp, Homo sapiens
tccagaaaagctaggcaatttacackcctatcatctgtatttaagtatcca

SEQ ID NO: 3727 - DNA, 51 bp, Homo sapiens
ttataatttcataatggagatgccaygagagattaataaaccaagttacat

SEQ ID NO: 3728 - DNA, 51 bp, Homo sapiens
gtggccaataaagagtagatatgtaygctttgaaatgtaatcaaattatta

SEQ ID NO: 3729 - DNA, 51 bp, Homo sapiens
tgatgctcaagttttatcctagtaaygaactatcaaaatgatccctgagag

SEQ ID NO: 3730 - DNA, 51 bp, Homo sapiens
tatatggctcctattgtcttaacacsgatcagaagcagggcctttttcttt

SEQ ID NO: 3731 - DNA, 51 bp, Homo sapiens
gatggaattattatctctctcttagmaaacaaaaagccatggctcagaaat

SEQ ID NO: 3732 - DNA, 51 bp, Homo sapiens
cagatgataaccagagaaaccaatcragaaacaagggaagtgcaggggaga

SEQ ID NO: 3733 - DNA, 51 bp, Homo sapiens
  misc_feature (6)..(6): n is a, c, g, or t
ctcagnccaatggctttgaataatcyaacacctttagaaaggccgttccta

SEQ ID NO: 3734 - DNA, 51 bp, Homo sapiens
ccagtcctttctctctggattgtcakaatttaatctgaagcctagacataa

SEQ ID NO: 3735 - DNA, 51 bp, Homo sapiens
atgcagtagcatctctgtggtaagaratttaatggaagtgtcattaaggaa

SEQ ID NO: 3736 - DNA, 51 bp, Homo sapiens
tcaagtgaatgtgggaacctaatagrcaaaatgtggtatacaaggcacaga

SEQ ID NO: 3737 - DNA, 51 bp, Homo sapiens
ggcccgcattcagacgccagctttasaatataccagttatttaacctcttt

SEQ ID NO: 3738 - DNA, 51 bp, Homo sapiens
agtgttaagacatttatgacatagargctaaaatctgtgttttacaccaca

SEQ ID NO: 3739 - DNA, 51 bp, Homo sapiens
gtgttgcaatcatgtagaaagcctarggacataaaatcctctgtaactgtt

SEQ ID NO: 3740 - DNA, 51 bp, Homo sapiens
ctcttttatatttatcttgcttacaytatgtggcaatatttttttctcact

SEQ ID NO: 3741 - DNA, 51 bp, Homo sapiens
taggtgtgggctcccagaattttcaytgacagaaagatagaaaggaagcag

SEQ ID NO: 3742 - DNA, 51 bp, Homo sapiens
gtagctgaactaattatacttaaaawctaagatggatagagaagaaggaat

SEQ ID NO: 3743 - DNA, 51 bp, Homo sapiens
taaaagacattaccagactcatgaargtgctgtataaaggtaaatatatag

SEQ ID NO: 3744 - DNA, 51 bp, Homo sapiens
catatgaaaagttcttgattcttcaytcaaagacaaaaaaatggataattc

SEQ ID NO: 3745 - DNA, 51 bp, Homo sapiens
tttctaccaagttgtgcgaaacctcragacctttgaaagtgtggttacttt

SEQ ID NO: 3746 - DNA, 51 bp, Homo sapiens
aagttggtgtttatctgctacagcaycttatttacattacgaatattctca

SEQ ID NO: 3747 - DNA, 51 bp, Homo sapiens
agtaaagtaaaaaataaagggatcartatattcacacaatattgaaaactg

SEQ ID NO: 3748 - DNA, 51 bp, Homo sapiens
aaacaaacttttatatgatccttaargtaaaagcagaattgaaactggcca

SEQ ID NO: 3749 - DNA, 51 bp, Homo sapiens
gaattttttgctattcagtttatgcraatgatctcaatacttaaaaaaatt

SEQ ID NO: 3750 - DNA, 51 bp, Homo sapiens
agctccagcctctttggtggactatragattaataaaatgtggttcaaaga

SEQ ID NO: 3751 - DNA, 51 bp, Homo sapiens
ctctatgtttctcatttcaagaagargcctattattttaccccagcatata

SEQ ID NO: 3752 - DNA, 51 bp, Homo sapiens
cccatcatcactcccagttattttaygcactttgaaatttgaacttttcat

SEQ ID NO: 3753 - DNA, 51 bp, Homo sapiens
aataggaattccactgtacataccayatactcaaccatcaaaaatcagcca

SEQ ID NO: 3754 - DNA, 51 bp, Homo sapiens
taaaagactgagcaatattatgtggsataccatgtcaatacattagtcatt

SEQ ID NO: 3755 - DNA, 51 bp, Homo sapiens
gtgcaactttaaatattatccagtaraatttcctttccagctgagattttc

SEQ ID NO: 3756 - DNA, 51 bp, Homo sapiens
cacatcgaatcagctatgaaattaaractccattgcaggttatcctaattt

SEQ ID NO: 3757 - DNA, 51 bp, Homo sapiens
agatgtcaccagctggaagcggctarcagcaagtcccctgggacgttctca

SEQ ID NO: 3758 - DNA, 51 bp, Homo sapiens
atattagatccaggtggatttgtcaygataactggaccacaagaaaaaaaa

SEQ ID NO: 3759 - DNA, 51 bp, Homo sapiens
tttgaggtctcctcggtaacctgggwcataaaacagagtattaataaagtt

SEQ ID NO: 3760 - DNA, 51 bp, Homo sapiens
tattaaaccagaaccaacacacaaaygatctgtgcaaagaggtcagcaaaa

SEQ ID NO: 3761 - DNA, 51 bp, Homo sapiens
tgtacttcttgattactaaaacatayggaaattgtacaaatccagcatgaa

SEQ ID NO: 3762 - DNA, 51 bp, Homo sapiens
atgttgactaatctgtctcaagcaaycttaaaatacagaagtacaggaatg

SEQ ID NO: 3763 - DNA, 51 bp, Homo sapiens
tccaggagccttggataaggcttcartaaaaactcctgtacatgtatctct

SEQ ID NO: 3764 - DNA, 51 bp, Homo sapiens
catagcaggttcctattcttctctgyaagctgctgatatattgctaaagct

SEQ ID NO: 3765 - DNA, 51 bp, Homo sapiens
tcagacttctaagggtatctgtatgwactgctagtgaaccagggtttctgg

SEQ ID NO: 3766 - DNA, 51 bp, Homo sapiens
aatgaaaacatctcgtggtctctcargtcggacacagaagtgcttttgagt

SEQ ID NO: 3767 - DNA, 51 bp, Homo sapiens
aaggaactggctgtgaattaaagagratatggtgatcctgagagtaaaaca

SEQ ID NO: 3768 - DNA, 51 bp, Homo sapiens
ataattacaacaacaacagcactaaygccgtgtacatattatatgtccaga

SEQ ID NO: 3769 - DNA, 51 bp, Homo sapiens
gaacttgggttataatataatcgtaytacaataggaggcagcatagtttag

SEQ ID NO: 3770 - DNA, 51 bp, Homo sapiens
cttaaaatctagaacctgtaactcartaagatgtcagtcacaatgtgtccg

SEQ ID NO: 3771 - DNA, 51 bp, Homo sapiens
agtatatgtttattgacttgtacgaygtaagcagaactctttttagatgtt

SEQ ID NO: 3772 - DNA, 51 bp, Homo sapiens
tttatctcatttaactataccaaccyggagcatactttacaatcctctttt

SEQ ID NO: 3773 - DNA, 51 bp, Homo sapiens
cccaggtcatctcccaatctaaggcraaaggtaccatagtcagtaacctaa

SEQ ID NO: 3774 - DNA, 51 bp, Homo sapiens
gaaaaaatttaatggcattcgcaacytaagcccactctctcccgctttttt

SEQ ID NO: 3775 - DNA, 51 bp, Homo sapiens
ctttcatctagatttgctatgtaacrcttctttgttagttgaataagaaaa

SEQ ID NO: 3776 - DNA, 51 bp, Homo sapiens
aggactggtatagttacattgatccrctacttgccattccctgcagcagca

SEQ ID NO: 3777 - DNA, 51 bp, Homo sapiens
tcttgccacctcttgcctaagaagamcatagttgcatattttcgtagcttc

SEQ ID NO: 3778 - DNA, 51 bp, Homo sapiens
ctcacaaaatattcaaaaactaagcygctagtacatgaatacaaatacctg

SEQ ID NO: 3779 - DNA, 51 bp, Homo sapiens
gtaattcagtttaatgatgacaaackctgcttttgtaatttcaattttctt

SEQ ID NO: 3780 - DNA, 51 bp, Homo sapiens
cattctatttatattttaaactcacratttcaactattaggaaaaagctga

SEQ ID NO: 3781 - DNA, 51 bp, Homo sapiens
atctgttcaactttataatgctgcaragaaatatcagtaactgtttagtca

SEQ ID NO: 3782 - DNA, 51 bp, Homo sapiens
gggaaaggccatttcagctcattgayaggtagtagaggattaacgtaattg

SEQ ID NO: 3783 - DNA, 51 bp, Homo sapiens
tttgtacaaaaacatacagtctacawctgattaaagcacagaagcttaagc

SEQ ID NO: 3784 - DNA, 51 bp, Homo sapiens
ttggcatgtctgctgagacaaatcayggacaacatgtctctcagcaacaaa

SEQ ID NO: 3785 - DNA, 51 bp, Homo sapiens
tgggagcaggcacagaaaggtaggaygacctagcttaaatccatatttcag

SEQ ID NO: 3786 - DNA, 51 bp, Homo sapiens
atccttcagattatacattttatcaygagaaagcttgtgaggaaaccacag

SEQ ID NO: 3787 - DNA, 51 bp, Homo sapiens
aggaggaaactcaagctgttgcctaytaagatccatgacttactttttaag

SEQ ID NO: 3788 - DNA, 51 bp, Homo sapiens
gttctcacatagaatgtaaaaaaaaytaatgaagtacattgccaggattga

SEQ ID NO: 3789 - DNA, 51 bp, Homo sapiens
atatgagacagagctgcctgcatgaragtagtaaagccaggtactgtaatg

SEQ ID NO: 3790 - DNA, 51 bp, Homo sapiens
ccagctctcttccagcattggttgamtatttaaaatcttgatttcatttat

SEQ ID NO: 3791 - DNA, 51 bp, Homo sapiens
tacccaggtttgcaattactttgtgwcttccatatgctaagcactggggag

SEQ ID NO: 3792 - DNA, 51 bp, Homo sapiens
tgggaaaaaaaaaaaaaaacaacagratagtgcaataacatggaagctaag

SEQ ID NO: 3793 - DNA, 51 bp, Homo sapiens
tcctccactgtttctcttcacttccrccattatttagatgcccaagtccaa

SEQ ID NO: 3794 - DNA, 51 bp, Homo sapiens
tttcatatgctcaatttcacggcaawaactaacatagataaatctacttaa

SEQ ID NO: 3795 - DNA, 51 bp, Homo sapiens
aaacataaataagacgtccagtaaawtacaaagattctcatggtgttagtg

SEQ ID NO: 3796 - DNA, 51 bp, Homo sapiens
ttgaaaaatatttgtacatgactaaktaaagcgtattcctaaagctttttt

SEQ ID NO: 3797 - DNA, 51 bp, Homo sapiens
cttagaaaagccttccttcctccagwaatatgatcagggccattttcttca

SEQ ID NO: 3798 - DNA, 51 bp, Homo sapiens
tgctgctcagctactgatgctaaaaygcgagaatggaaatggaattagtca

SEQ ID NO: 3799 - DNA, 51 bp, Homo sapiens
ttaaggaaaagtaaaaactggacagsaggtagatggagaagctggaggtga

SEQ ID NO: 3800 - DNA, 51 bp, Homo sapiens
atctcgttctgatgttagaacagtaygtctatatgacccatcacctgcccc

SEQ ID NO: 3801 - DNA, 51 bp, Homo sapiens
gaaatgggttgttgaggtctttgaamgttattactatttttgtgggtgttt

SEQ ID NO: 3802 - DNA, 51 bp, Homo sapiens
tccactgaatatcataatttgacacrgtgataaaaacacaaagactccatt

SEQ ID NO: 3803 - DNA, 51 bp, Homo sapiens
gtcccccgcaggattgtcaaaattargaatgatttactgtgccatttttgc

SEQ ID NO: 3804 - DNA, 51 bp, Homo sapiens
tttttatcgcaatgggaacccgtcasgtgcctttccaattactcagtgtct

SEQ ID NO: 3805 - DNA, 51 bp, Homo sapiens
gcccatacacagccctttctcgatayacattgatcctccaaacccaggagc

SEQ ID NO: 3806 - DNA, 51 bp, Homo sapiens
ggatgtgagcagggctaattgctatrtatggttatgtaggttggacatggc

SEQ ID NO: 3807 - DNA, 51 bp, Homo sapiens
agcagaagtgatggtcttggacattraaataggactgcttccctcagcctt

SEQ ID NO: 3808 - DNA, 51 bp, Homo sapiens
ggaaccctttactacaatggtataarcgatgaggattatttaaaaaataag

SEQ ID NO: 3809 - DNA, 51 bp, Homo sapiens
tgttaataattcagatcattcaacaygcaattggtatcacagaaacaaagt

SEQ ID NO: 3810 - DNA, 51 bp, Homo sapiens
aaagccctggaaagaaaattctttcrtgggctaagctccactttggggctt

SEQ ID NO: 3811 - DNA, 51 bp, Homo sapiens
catgctgactgcagtttggttgatcrctgggacaccacacacctacctccc

SEQ ID NO: 3812 - DNA, 51 bp, Homo sapiens
tgcttcggtgatgcagagaaagggascttaaaaagatcatctgttgattgt

SEQ ID NO: 3813 - DNA, 51 bp, Homo sapiens
acacaatttatagtaacagtactaaygccaccaatttctaaactacattct

SEQ ID NO: 3814 - DNA, 51 bp, Homo sapiens
tgagaattaaatgataaggtgtccayaaagatactccataaattataaggc

SEQ ID NO: 3815 - DNA, 51 bp, Homo sapiens
gctccaaggtcatgtgagtccacacygtaaaatgaaaaaccctacaaatgt

SEQ ID NO: 3816 - DNA, 51 bp, Homo sapiens
caatgtgacactaaaaggtactgggycatttagctctgctcctctacagaa

SEQ ID NO: 3817 - DNA, 51 bp, Homo sapiens
ccatctattagctaatgattttatasgtcagagtccaggtaggctcaactg

SEQ ID NO: 3818 - DNA, 51 bp, Homo sapiens
aaaacttctgtgaacgtttacatacrgagcttattgtggacaaatgcgtgg

SEQ ID NO: 3819 - DNA, 51 bp, Homo sapiens
aagctgaaaatcaatatccaggttcrcatgaacaaaactgcatggtccaga

SEQ ID NO: 3820 - DNA, 51 bp, Homo sapiens
tcagctttggtggtgggttgaggtaraggtaataaagaagtggaagattgt

SEQ ID NO: 3821 - DNA, 51 bp, Homo sapiens
gtattttgtggagactctattgtcckctaaagcaaaatttggttcaaataa

SEQ ID NO: 3822 - DNA, 51 bp, Homo sapiens
tttattttgagattaaactatctggraagtattgagaaatttggtatattg

SEQ ID NO: 3823 - DNA, 51 bp, Homo sapiens
aaccatgcttttgtcaatcatgtgarataggaaagtaaaatcaaatagttg

SEQ ID NO: 3824 - DNA, 51 bp, Homo sapiens
catcaccaaaacacacttacttaaarcagtctgacttgcccccaatcaacg

SEQ ID NO: 3825 - DNA, 51 bp, Homo sapiens
acataaaataattgttattagaaaamtgcgtgaacacgttgattgggggca

SEQ ID NO: 3826 - DNA, 51 bp, Homo sapiens
atttgcccaagtagtaggttgaaaaytagggattcagattcagctccacag

SEQ ID NO: 3827 - DNA, 51 bp, Homo sapiens
tataaaaacagctaacatttgtgaargatttattatattccaggttccatg

SEQ ID NO: 3828 - DNA, 51 bp, Homo sapiens
cttgggttaaaaatccaaccaaccayaaaattccacagaaactgaagtact

SEQ ID NO: 3829 - DNA, 51 bp, Homo sapiens
atccacttgccttacagctcttggamaaaaggtctgttttactggtaaatg

SEQ ID NO: 3830 - DNA, 51 bp, Homo sapiens
gggtaagttcattatctgcctactgytcaaactcagcgataaaaatagtgc

SEQ ID NO: 3831 - DNA, 51 bp, Homo sapiens
ggatgtggacaaaaaagcaaaagcartagttgacctagaattttaaaaatg

SEQ ID NO: 3832 - DNA, 51 bp, Homo sapiens
taatctggtctagcagttggcatgawtcaaagtaccgcagagaaacatcag

SEQ ID NO: 3833 - DNA, 51 bp, Homo sapiens
caatcaagaattccattactgaggawgcaagcactaaagtaattgctgctt

SEQ ID NO: 3834 - DNA, 51 bp, Homo sapiens
tataagtcatactcaaacatattcamgagccatatacctgaccagaaaatg

SEQ ID NO: 3835 - DNA, 51 bp, Homo sapiens
ttattcggaagatgttttatttaagsctccttttcatttcaaagttaatta

SEQ ID NO: 3836 - DNA, 51 bp, Homo sapiens
caaataagtggttttactgtttttcyctggtgaattaattagttgtttaat

SEQ ID NO: 3837 - DNA, 51 bp, Homo sapiens
ataatgaatcctagatttcttctccraggatttcagaagtgaggaaaggtc

SEQ ID NO: 3838 - DNA, 51 bp, Homo sapiens
aaaatgttttaatataatgggtctaygctacataataaatgttttaaaggc

SEQ ID NO: 3839 - DNA, 51 bp, Homo sapiens
gaatttgtctataactgttccacacmatgttcaaataatgaattccttgta

SEQ ID NO: 3840 - DNA, 51 bp, Homo sapiens
taaataccatatttttttaaatcagwagatcatacttcccccactcctttt

SEQ ID NO: 3841 - DNA, 51 bp, Homo sapiens
tacattatctctcaagcaaggtgacrcttttttcaaggttaattatttata

SEQ ID NO: 3842 - DNA, 51 bp, Homo sapiens
cttcagattcattaaaccattccacyatctattgtgacattgacacctaca

SEQ ID NO: 3843 - DNA, 51 bp, Homo sapiens
catgatggttttgacaaagttcaagragtgtgtaggtgtcaatgtcacaat

SEQ ID NO: 3844 - DNA, 51 bp, Homo sapiens
acaaaatcatggtgatagtgaacatratggttttgacaaagttcaaggagt

SEQ ID NO: 3845 - DNA, 51 bp, Homo sapiens
taaaacccctcagaatggttttggcrcttttaaataaatggttcagaatgg

SEQ ID NO: 3846 - DNA, 51 bp, Homo sapiens
aatcacaaattcctaatccctggaaragactaatcaatacaacacaatgtt

SEQ ID NO: 3847 - DNA, 51 bp, Homo sapiens
acacacctctatttctgtcattacawctaattgtctgtgtgatggttaatt

SEQ ID NO: 3848 - DNA, 51 bp, Homo sapiens
cattcttttccaacctgggtctccaygtctatatatatattttaaaagttg

SEQ ID NO: 3849 - DNA, 51 bp, Homo sapiens
attgaaattaatttgttggctttcayccggaaggcagataaacactgccca

SEQ ID NO: 3850 - DNA, 51 bp, Homo sapiens
ttcttacaaatacatttttacaaaastctgctagaactgtaaatgataggc

SEQ ID NO: 3851 - DNA, 51 bp, Homo sapiens
accttaatcgtatagtctattccacygtaattgatggtttagttatccaca

SEQ ID NO: 3852 - DNA, 51 bp, Homo sapiens
agggaacaactgttttgatgggtagmccacggatgtagaagaagattaaaa

SEQ ID NO: 3853 - DNA, 51 bp, Homo sapiens
caatggaactacagataaaaacttgmatgtcagtattatatgtattagtgt

SEQ ID NO: 3854 - DNA, 51 bp, Homo sapiens
ctagcctaatctcacctcccagagaygattcttttatgctgtcttccatag

SEQ ID NO: 3855 - DNA, 51 bp, Homo sapiens
ttctactttaattatgaaaaattacraaagtacaaaatatctagataattg

SEQ ID NO: 3856 - DNA, 51 bp, Homo sapiens
tagaaaaattctaaactctaatgacwactactttggttggagaaatgacat

SEQ ID NO: 3857 - DNA, 51 bp, Homo sapiens
cgaacataaataatggcgtaaagaawctaccaagtactttgtcagaataaa

SEQ ID NO: 3858 - DNA, 51 bp, Homo sapiens
aaatttttacatttttttaatgacckccagatttcacctgaataaaaacca

SEQ ID NO: 3859 - DNA, 51 bp, Homo sapiens
gcaagggaatctagtccagtagcaartaacatggctaagtactacattctc

SEQ ID NO: 3860 - DNA, 51 bp, Homo sapiens
tatcattgctagaaatttctctttaygtcaaggtgacttttcccatagtaa

SEQ ID NO: 3861 - DNA, 51 bp, Homo sapiens
ttcattttgccctcctcaaccttcaytgaacgtccctttgacatgtgatat

SEQ ID NO: 3862 - DNA, 51 bp, Homo sapiens
gaaagaagaaagaattacacagaccratgtacaatggaccaagaagcttga

SEQ ID NO: 3863 - DNA, 51 bp, Homo sapiens
catatttaaaatgcatatcatgtaarcagcatacaagtaagcttgcatttt

SEQ ID NO: 3864 - DNA, 51 bp, Homo sapiens
aaaaagcaagtgtgtattattttatwaaaaaagcctaaacaaatgtcttaa

SEQ ID NO: 3865 - DNA, 51 bp, Homo sapiens
tgttatcaataagttttagcaattawgatgttatgagtattcttattgtat

SEQ ID NO: 3866 - DNA, 51 bp, Homo sapiens
gtgatactagcaagaagcctatgaaragggagtaataaatgaaagtcagga

SEQ ID NO: 3867 - DNA, 51 bp, Homo sapiens
caagcccagagagtaaaacaaatgayggtaggctgctccccagtccctatc

SEQ ID NO: 3868 - DNA, 51 bp, Homo sapiens
gacagaggccccaggcttaccgacakatgagcttccaaaaagagtttgatg

SEQ ID NO: 3869 - DNA, 51 bp, Homo sapiens
caaggaggtaagataaagtatatggrcatagatgcagaaaggtggagactg

SEQ ID NO: 3870 - DNA, 51 bp, Homo sapiens
aagaaaatgtctgccaaaatccccamgtctgattcaccatagtttgcctgt

SEQ ID NO: 3871 - DNA, 51 bp, Homo sapiens
ggcagtgagtattggacaagaccaartatggaaagtgtgggaaatcagctt

SEQ ID NO: 3872 - DNA, 51 bp, Homo sapiens
tctccagaagaccaaaataaataaartcaagtagggcatataagtctatat

SEQ ID NO: 3873 - DNA, 51 bp, Homo sapiens
tcagggagaggatgactctgcaatgmcaagtggattacctagctttatcac

SEQ ID NO: 3874 - DNA, 51 bp, Homo sapiens
acgaatcaggtagtgagttagaatcratgctttaagtgttaatgttgctgg

SEQ ID NO: 3875 - DNA, 51 bp, Homo sapiens
cagacacgtctcacatgtaacctagraacatagtttattctaaagacaagc

SEQ ID NO: 3876 - DNA, 51 bp, Homo sapiens
tttaactcccgaatttcactcactayggtatctaaaataaaagccttaaat

SEQ ID NO: 3877 - DNA, 51 bp, Homo sapiens
taacatctagcataaccatgttacartgatgaaaaccaaataattacattg

SEQ ID NO: 3878 - DNA, 51 bp, Homo sapiens
acttctgacattttaaatctcaacaytaatgataaacatcgttttatgcta

SEQ ID NO: 3879 - DNA, 51 bp, Homo sapiens
tctctccacacataggatgtgtttargtttccttaataaaagtcttctctt

SEQ ID NO: 3880 - DNA, 51 bp, Homo sapiens
gacagtgatgcttgaaggaagtccaktgcataaatctcaacaagatgtcct

SEQ ID NO: 3881 - DNA, 51 bp, Homo sapiens
ttctgatataaagttctaaagtgcartctgacagagaatgtggcaaaaatc

SEQ ID NO: 3882 - DNA, 51 bp, Homo sapiens
ttctaagcattgttatttgtgaaggraaggatcatttttcttgcataatgc

SEQ ID NO: 3883 - DNA, 51 bp, Homo sapiens
attattttttcctaactgtgatggcmaaattctccttcagtgggttgaaga

SEQ ID NO: 3884 - DNA, 51 bp, Homo sapiens
atcatctccagcctcacaaactaaaytagccagtctgtcttaatgtgtgat

SEQ ID NO: 3885 - DNA, 51 bp, Homo sapiens
tgagagctcatctaggtaatccaacsagagtcactgtaacacagaactaga

SEQ ID NO: 3886 - DNA, 51 bp, Homo sapiens
ctcagttcccagaccactctccccartacgcacagtaatatgactgggcat

SEQ ID NO: 3887 - DNA, 51 bp, Homo sapiens
ccctccttcagctgtaaaagcaacaratgtcctaatgggcttttccatcct

SEQ ID NO: 3888 - DNA, 51 bp, Homo sapiens
gttattcctggagacccagcccagasactgctgatttaggcttctccttcc

SEQ ID NO: 3889 - DNA, 51 bp, Homo sapiens
tgcggggttttctgtggaatcgttaygggaaagtcagggtcacactgtgga

SEQ ID NO: 3890 - DNA, 51 bp, Homo sapiens
ctttgcaaataaaaaatctgaacaayctgggaaactagaacacttgttaac

SEQ ID NO: 3891 - DNA, 51 bp, Homo sapiens
ttttgtttgtgtgaattcaaccacartgaaggaattattgtctggtgaacc

SEQ ID NO: 3892 - DNA, 51 bp, Homo sapiens
gctggaaaccttaggaaagaaatccraatatatagtaactatatgtatcaa

SEQ ID NO: 3893 - DNA, 51 bp, Homo sapiens
tcaaacctgtgtcactaggcaataayggaagattcaggaaaagctgaagag

SEQ ID NO: 3894 - DNA, 51 bp, Homo sapiens
tgaggcagtgtatgacaggttatatyaccccaagatatcacaaataaaatg

SEQ ID NO: 3895 - DNA, 51 bp, Homo sapiens
aggtattgaaagttatggtctcaccratggacttgattcccacctcagcta

SEQ ID NO: 3896 - DNA, 51 bp, Homo sapiens
agttttgtgtaaattactgaaggaayggaatttgatcaggattagtggcaa

SEQ ID NO: 3897 - DNA, 51 bp, Homo sapiens
gtatatatgaatacagaagataatawgcccaatatagaatatttttgttca

SEQ ID NO: 3898 - DNA, 51 bp, Homo sapiens
gatttattaggcagcaatagatagcrgacacaccttaatgcattattctga

SEQ ID NO: 3899 - DNA, 51 bp, Homo sapiens
ctgcctaataaatcacccaaaaacayagtgacttaacaacagtcattttta

SEQ ID NO: 3900 - DNA, 51 bp, Homo sapiens
tcttcagagcttcagtattattacaktctttcacaaaagtactgtggcaat

SEQ ID NO: 3901 - DNA, 51 bp, Homo sapiens
gagaaaagctactccttattccaggraagttaaaaatcaactcagaagtac

SEQ ID NO: 3902 - DNA, 51 bp, Homo sapiens
tgagaaagaaaatctgtaaggaatamattctggattcaggtactggaatct

SEQ ID NO: 3903 - DNA, 51 bp, Homo sapiens
cttggaccacaccagacagtctatastaaaatgtaattagtgttggggctt

SEQ ID NO: 3904 - DNA, 51 bp, Homo sapiens
attagtacagtcactaatctctctaytaacaccttaaatatctctttgatt

SEQ ID NO: 3905 - DNA, 51 bp, Homo sapiens
acagcctgataggtcttcaagacacrgtcatcatcaatgaatatgtgccaa

SEQ ID NO: 3906 - DNA, 51 bp, Homo sapiens
agcatttatttcctccacttgaggaycttgttgttagagttgtttgtggat

SEQ ID NO: 3907 - DNA, 51 bp, Homo sapiens
gagctgtccattggtgagcttcctakatatgatttcaatgctccggccctt

SEQ ID NO: 3908 - DNA, 51 bp, Homo sapiens
ctgcatttctcatcctgttatcccgwagacaaagtggggccacctcaaagt

SEQ ID NO: 3909 - DNA, 51 bp, Homo sapiens
agcaatcagaggaattggtgagtgayattttacaattcctttcttaatgtt

SEQ ID NO: 3910 - DNA, 51 bp, Homo sapiens
gcattatcaaggtaactgatgaagayagtttgtacgtgacctcttgaggag

SEQ ID NO: 3911 - DNA, 51 bp, Homo sapiens
ttttcctgaaactataagtttgagayatattagaagaagaatgtgggcaag

SEQ ID NO: 3912 - DNA, 51 bp, Homo sapiens
ggtcactggagactaagaatgttacraagggtgaagatttgtgttaccctt

SEQ ID NO: 3913 - DNA, 51 bp, Homo sapiens
tttaaatatccatataatctgtcagycgatgtgtttaaatgcaacagttac

SEQ ID NO: 3914 - DNA, 51 bp, Homo sapiens
aagtccaggcttcgcttgattttcawtatgaggacagtgagtaatttttct

SEQ ID NO: 3915 - DNA, 51 bp, Homo sapiens
taaaatgttatggctcaaggataaayaaaatagaatcatgggacccagggg

SEQ ID NO: 3916 - DNA, 51 bp, Homo sapiens
aaagtgatgtgctgtaagaggaagawccaagacaaaattcagtttccctga

SEQ ID NO: 3917 - DNA, 51 bp, Homo sapiens
gcaaatgcttttgattttttaatagwcatacacagattgtgtttctccttc

SEQ ID NO: 3918 - DNA, 51 bp, Homo sapiens
actttttcagaaatgttaatgggtaragcaagaaataccaatcataagtga

SEQ ID NO: 3919 - DNA, 51 bp, Homo sapiens
aatcaagtcagataaggactgataasaagagtgttctattgtaacccacag

SEQ ID NO: 3920 - DNA, 51 bp, Homo sapiens
accgattacatgttcacttgactgasagatacaatcacctatattaggagc

SEQ ID NO: 3921 - DNA, 51 bp, Homo sapiens
gtacaattagcaatggatgctgctayatgaaagaatgctatctattccctc

SEQ ID NO: 3922 - DNA, 51 bp, Homo sapiens
aagactggaaaaaaacacaaacgccyatgtaatggattatatacagcctga

SEQ ID NO: 3923 - DNA, 51 bp, Homo sapiens
aaaattcagtttttctttccttagakgctctcagtcagtgttggccatcct

SEQ ID NO: 3924 - DNA, 51 bp, Homo sapiens
tccctcaagcttcctgttcacttaaragattattccttgaaaaataaattg

SEQ ID NO: 3925 - DNA, 51 bp, Homo sapiens
taacacccagcatcaacttgtcaacsaactgagtgagccatcttggacggg

SEQ ID NO: 3926 - DNA, 51 bp, Homo sapiens
agcctttcccttcaatgggctgacayataaacagataattttttacaccca

SEQ ID NO: 3927 - DNA, 51 bp, Homo sapiens
ggcctagaaacctttttacctagcaratttctgataaaaaatcttcatttt

SEQ ID NO: 3928 - DNA, 51 bp, Homo sapiens
aggagctgaaaatgcactttgaactsagatgtaaagacctatggagtccaa

SEQ ID NO: 3929 - DNA, 51 bp, Homo sapiens
tgtcaaagtatcaaataagattctayggtgaaggtgcgtgcatcagaaaga

SEQ ID NO: 3930 - DNA, 51 bp, Homo sapiens
catttaaaatgtttcagtcactatawatatgttatacacacctgtaaattg

SEQ ID NO: 3931 - DNA, 51 bp, Homo sapiens
cattagcttgttaaattattgattaygcttttagttctcataaaatgtgaa

SEQ ID NO: 3932 - DNA, 51 bp, Homo sapiens
tgaaaatataataatctctactgaaytgactgaatagtgaataaaatgaat

SEQ ID NO: 3933 - DNA, 51 bp, Homo sapiens
ccttcagaagagctggatctagatamctttaagtccaagttgattggaggc

SEQ ID NO: 3934 - DNA, 51 bp, Homo sapiens
tagttggggggaatagatgagttaasaattcctctgcttgaaatagtggct

SEQ ID NO: 3935 - DNA, 51 bp, Homo sapiens
acccacttagggcctataattagaarggcatctcttctttccaagggtaag

SEQ ID NO: 3936 - DNA, 51 bp, Homo sapiens
ccaaacaatgccatcttgtcctacasagtgttcccaaagcagccttttctg

SEQ ID NO: 3937 - DNA, 51 bp, Homo sapiens
tttctcatttaactgaatactgaaastacaattactataaatggaaagtcc

SEQ ID NO: 3938 - DNA, 51 bp, Homo sapiens
actgttttctgctctataatctacamccttatttattttagttagcttcct

SEQ ID NO: 3939 - DNA, 51 bp, Homo sapiens
aaacccccaagaaaattaatgccgaktattctcaacaaatatctatttata

SEQ ID NO: 3940 - DNA, 51 bp, Homo sapiens
agcatagaattctagtcagagaacasattccagctgcaaaaaaatacatag

SEQ ID NO: 3941 - DNA, 51 bp, Homo sapiens
tgacacatgatagggcttttaacaayggcgcgcatgacgccaccattcacg

SEQ ID NO: 3942 - DNA, 51 bp, Homo sapiens
gagccaccgcgcccggctgagaatamgatatttggcaaagacttgaagaag

SEQ ID NO: 3943 - DNA, 51 bp, Homo sapiens
attattccttaggttccatcttctargagaactgatcttgatgtaggtttc

SEQ ID NO: 3944 - DNA, 51 bp, Homo sapiens
tactcaatttgggtattatcagaaaygctgtagaatcaattgatcttcaga

SEQ ID NO: 3945 - DNA, 51 bp, Homo sapiens
ataaatacatgaaattctcaagaaartctgaggctaaatatattgtgaaag

SEQ ID NO: 3946 - DNA, 51 bp, Homo sapiens
tataggataacaaataaaatgcaggsatatcattaaaaataacatataaac

SEQ ID NO: 3947 - DNA, 51 bp, Homo sapiens
gcaaaacaaaaactctaaagagagcsaattatgttatcatcacctgtgtaa

SEQ ID NO: 3948 - DNA, 51 bp, Homo sapiens
ttaaacatgagagttgttgactacayggtttggagaaggaaaattaaagtg

SEQ ID NO: 3949 - DNA, 51 bp, Homo sapiens
gtaacttgcatgtacaaaataattartaattagcatgaaggttattccaca

SEQ ID NO: 3950 - DNA, 51 bp, Homo sapiens
tctgcttggtgccctattctactgcractaagctgccatccaagccacaca

SEQ ID NO: 3951 - DNA, 51 bp, Homo sapiens
taaaaacaaatttaggcagaaaatamatggaatcaacattattcttattta

SEQ ID NO: 3952 - DNA, 51 bp, Homo sapiens
tggtgtgagcagtggaaaagaatagractgtcatgaattgtgattgggaat

SEQ ID NO: 3953 - DNA, 51 bp, Homo sapiens
catggtggaagcatttatgcctcagmaattagaaaatactatggatcacgt

SEQ ID NO: 3954 - DNA, 51 bp, Homo sapiens
atagtatgttattcctctagtgagawctgattaaaaatatgccagtgttca

SEQ ID NO: 3955 - DNA, 51 bp, Homo sapiens
ctgtcggagaaagtatttaggtcacygtccaaaatacttcttaggagctgc

SEQ ID NO: 3956 - DNA, 51 bp, Homo sapiens
aaattccacgaaggacaaagcatccrcatattttgttagatgtgggtctga

SEQ ID NO: 3957 - DNA, 51 bp, Homo sapiens
aaatcaaaaactagaagcagattccratgaatttcacaaaattaaacatga

SEQ ID NO: 3958 - DNA, 51 bp, Homo sapiens
gaaaaataaaatcctcattggacaayaattagtatcagcaagttttgagtt

SEQ ID NO: 3959 - DNA, 51 bp, Homo sapiens
atacttcaaatcctatgttcatggargttctgaaaacaagagagaaaggca

SEQ ID NO: 3960 - DNA, 51 bp, Homo sapiens
accacttttcctcttcattcaggaasgtcaatgaatatctacatatttgta

SEQ ID NO: 3961 - DNA, 51 bp, Homo sapiens
atagtccctttctgaaatttgtcgtmgtctggaactattttgggtttgaaa

SEQ ID NO: 3962 - DNA, 51 bp, Homo sapiens
tggtgaatacaaaactggtaagcaartagttttatgactgaggatcacagc

SEQ ID NO: 3963 - DNA, 51 bp, Homo sapiens
aataactcagctggctggatctataraagtcagttccaaaatatgttctgt

SEQ ID NO: 3964 - DNA, 51 bp, Homo sapiens
aaattttcccaatattgctagaggastcaagatgaaactataggaaattca

SEQ ID NO: 3965 - DNA, 51 bp, Homo sapiens
ttctaagccctggctaaggaaaacaygaattccgaaatttcttctaactgg

SEQ ID NO: 3966 - DNA, 51 bp, Homo sapiens
aagatagcaatagtttctctcactcyatgtgctttccaagaactttgccac

SEQ ID NO: 3967 - DNA, 51 bp, Homo sapiens
ttgttctcacctggagtcaataaaaygaaaagtaatgaagcttacagcaaa

SEQ ID NO: 3968 - DNA, 51 bp, Homo sapiens
catgcaaagcaatgaaattccacaaraccatatgagtgttttctggtatgt

SEQ ID NO: 3969 - DNA, 51 bp, Homo sapiens
acacacatacttaccagtgagttacrattgcctgcagtgtttagtagagta

SEQ ID NO: 3970 - DNA, 51 bp, Homo sapiens
tgccaaagttgagggtacatctggawaaaagaaagaaaagtcacagtaaga

SEQ ID NO: 3971 - DNA, 51 bp, Homo sapiens
ccctgcaattacattcctccagatcyctgatacaaaagatcactctcttct

SEQ ID NO: 3972 - DNA, 51 bp, Homo sapiens
gtctgtttaaaactttgagcaattcmcgtaatcaaatatctttcttaaagt

SEQ ID NO: 3973 - DNA, 51 bp, Homo sapiens
ggttgacttgctgagaatgtggagaytaaagccataaatattgatattttg

SEQ ID NO: 3974 - DNA, 51 bp, Homo sapiens
gaggtgatgaacttgaactgaagagsaaggcatttgagagggagatttctc

SEQ ID NO: 3975 - DNA, 51 bp, Homo sapiens
cacttacatactattacaataatgawgctgaagtattttttaggaaaacaa

SEQ ID NO: 3976 - DNA, 51 bp, Homo sapiens
tgaaaaacaaattatcgattcagtaraccaataagatgttaaatttcagaa

SEQ ID NO: 3977 - DNA, 51 bp, Homo sapiens
gcagacaaaagatcctcaaaactcamgttgaatctataggagccttcaact

SEQ ID NO: 3978 - DNA, 51 bp, Homo sapiens
aacaagattaaccctgattgcacggyaaaattacctggagaggtttttttt

SEQ ID NO: 3979 - DNA, 51 bp, Homo sapiens
aaattagtgaaccaaaaatagaaatyagatttgtgcaaacatggagaaatc

SEQ ID NO: 3980 - DNA, 51 bp, Homo sapiens
gtgcttaattaaaaccttatgcttamacaaacattggtttagttctcaaat

SEQ ID NO: 3981 - DNA, 51 bp, Homo sapiens
actgttctagatgtgcttttctgaargtcctctttggtaggagaatggaag

SEQ ID NO: 3982 - DNA, 51 bp, Homo sapiens
cgtggccatctgtctgggactttccraggcttccattgtctgtctcagcag

SEQ ID NO: 3983 - DNA, 51 bp, Homo sapiens
ggataacaagtgattgggctgcttayctttaacccttcagtgttggaggat

SEQ ID NO: 3984 - DNA, 51 bp, Homo sapiens
tgtaccctttgagtacaatccggaayatcagtcagggccctgagcaatggt

SEQ ID NO: 3985 - DNA, 51 bp, Homo sapiens
tgcttttgtgaaatatttttgttcaygtctactatttacatgaagccaagt

SEQ ID NO: 3986 - DNA, 51 bp, Homo sapiens
ctttatggtacattggagtccctcartaatcaacacatgcccctctaatcc

SEQ ID NO: 3987 - DNA, 51 bp, Homo sapiens
aagaatgtgcctagcacatagtagaygctgtataaatgttggtctcctcta

SEQ ID NO: 3988 - DNA, 51 bp, Homo sapiens
ttatggaaaacaatggaatgagtacwgaatagttgttcttcttgatcattt

SEQ ID NO: 3989 - DNA, 51 bp, Homo sapiens
actactattaagaatgaatctcaaastttaatgggcaacgaatcatctaga

SEQ ID NO: 3990 - DNA, 51 bp, Homo sapiens
attctgatggccagagtctgtgacawcctagagcagtggttttcacccctg

SEQ ID NO: 3991 - DNA, 51 bp, Homo sapiens
gactttactaattgtctataaccaaraagttatggtttgatatcactgcat

SEQ ID NO: 3992 - DNA, 51 bp, Homo sapiens
gtccattcaaagagaaattaaacggyccatgttctgaaattcgtatttaca

SEQ ID NO: 3993 - DNA, 51 bp, Homo sapiens
tttttttttttttgtaaatggaaatyagataagatgtcatgtataggatat

SEQ ID NO: 3994 - DNA, 51 bp, Homo sapiens
ttggatttcatttccatggacctcarattcctcatgtaatgaaagggttta

SEQ ID NO: 3995 - DNA, 51 bp, Homo sapiens
tcattcatcactcttatgggaacacrgaaacattcgggctgtgcaattcag

SEQ ID NO: 3996 - DNA, 51 bp, Homo sapiens
tgtgactccaggttggattcaagtayggttttctatttttcttctgattgt

SEQ ID NO: 3997 - DNA, 51 bp, Homo sapiens
tctgttatttgtacctagatccaccrataatctcagaaggctatatatgca

SEQ ID NO: 3998 - DNA, 51 bp, Homo sapiens
tgttattgaaaaatagctaaacttaragtcattcagaaagacaaataaaaa

SEQ ID NO: 3999 - DNA, 51 bp, Homo sapiens
gtcaatgggatcataaaatgtatgaytataatggtactgcagaggaaagtc

SEQ ID NO: 4000 - DNA, 51 bp, Homo sapiens
tattaatattttcatgaccttgaccrgatcaatatattgcacaaatattat

SEQ ID NO: 4001 - DNA, 51 bp, Homo sapiens
catgtttatttcaactgaagaaacakggcattatgaaattttgtaaaatat

SEQ ID NO: 4002 - DNA, 51 bp, Homo sapiens
gagagtttaaaactttcaagcttaaygtgaaaaatttgtttccagcaggga

SEQ ID NO: 4003 - DNA, 51 bp, Homo sapiens
gagtttgtgggaagagtaccatggayggaagatctgttgaaaaattcattc

SEQ ID NO: 4004 - DNA, 51 bp, Homo sapiens
caccttaacctccaagtacaataacrcctgtgctgactctgggaaagctgg

SEQ ID NO: 4005 - DNA, 51 bp, Homo sapiens
aaaatatattttctatatttcttctraaagtttcaaagttagttttttcac

SEQ ID NO: 4006 - DNA, 51 bp, Homo sapiens
gaagtgtgctctttgttagttttcckaaaaatgcctcaagctaattaatgc

SEQ ID NO: 4007 - DNA, 51 bp, Homo sapiens
taccaatagtgaaataacatgtacayaatttttttaaatgcagacacacat

SEQ ID NO: 4008 - DNA, 51 bp, Homo sapiens
agccacagtttggaacctcttgttgsactgtaattggactttctccacatg

SEQ ID NO: 4009 - DNA, 51 bp, Homo sapiens
taagatgttagctgttaacatacacrcagatagccttttatatttggcctt

SEQ ID NO: 4010 - DNA, 51 bp, Homo sapiens
gaaaacaaagctatttttaaaaccaygaatctctgacaagaacaaagtcag

SEQ ID NO: 4011 - DNA, 51 bp, Homo sapiens
acacatttactatagaaaattaaacyaatacaagtaaatacatagaagaaa

SEQ ID NO: 4012 - DNA, 51 bp, Homo sapiens
gcactagaacataagtctcatgagartaagaactgtagtgtattttgttca

SEQ ID NO: 4013 - DNA, 51 bp, Homo sapiens
cagaatagggaaagattgtccaatayagtcctaaagagtcaagatcaaccc

SEQ ID NO: 4014 - DNA, 51 bp, Homo sapiens
tcaggagtaaaagagaacaaatgcaygtgagtatgaaatattattttgccc

SEQ ID NO: 4015 - DNA, 51 bp, Homo sapiens
ttttatgagaagtctctcatttcacrcactgtacctgcttctttcaagtta

SEQ ID NO: 4016 - DNA, 51 bp, Homo sapiens
aacttccagtaagtagagcctagcayagaagttacagattagagctgcatt

SEQ ID NO: 4017 - DNA, 51 bp, Homo sapiens
gatgcactgtgtccaaagacatgccragcttcagaggcaaacacctgtcca

SEQ ID NO: 4018 - DNA, 51 bp, Homo sapiens
gtttactcaaaacaatcatattaaaragaaatgtacagcaaaagacatgaa

SEQ ID NO: 4019 - DNA, 51 bp, Homo sapiens
atagagtagaggtataaattatatgmcataggagaattaattagctgatta

SEQ ID NO: 4020 - DNA, 51 bp, Homo sapiens
ttgtagcagatgatggtcacctttaygggattacaggacttgccaaatctt

SEQ ID NO: 4021 - DNA, 51 bp, Homo sapiens
ttcagattgctctttgctttgtttaygagttcagttcaacccccttattct

SEQ ID NO: 4022 - DNA, 51 bp, Homo sapiens
atatgttagttcaaggtatatttgcrcaagatttctttgtgatcccaccca

SEQ ID NO: 4023 - DNA, 51 bp, Homo sapiens
cctataggggtcaaacagaatgagcsacagttgaaagcatgactccaaaac

SEQ ID NO: 4024 - DNA, 51 bp, Homo sapiens
ggtgtctacaggacgttttgaaagcraagcctctttggactgtacgagaag

SEQ ID NO: 4025 - DNA, 51 bp, Homo sapiens
agaaaaaaaattccacaaattgctaygtaatatttgaaaacaacttaaaca

SEQ ID NO: 4026 - DNA, 51 bp, Homo sapiens
atatggcattttgttataatatcctkaacagactaagacagatatcgttta

SEQ ID NO: 4027 - DNA, 51 bp, Homo sapiens
caggaggagaaaatgttactgattaygggcaaaaatccaaggtggaacttt

SEQ ID NO: 4028 - DNA, 51 bp, Homo sapiens
gttagaggcttttagagacttcaacycaggattttcacagcagaatatcag

SEQ ID NO: 4029 - DNA, 51 bp, Homo sapiens
cacacagcaaggagcaaagcgataaygagaacccaagctccccagcgtccc

SEQ ID NO: 4030 - DNA, 51 bp, Homo sapiens
tttatagagggaatactgtttcaacsagaacctgggagggtttccactggc

SEQ ID NO: 4031 - DNA, 51 bp, Homo sapiens
acaagcttggaaaaaacaatgtgtaraatcccttccagggcccaccagcag

SEQ ID NO: 4032 - DNA, 51 bp, Homo sapiens
tctgctctgcagtctctgatattctsacacctggttctaatgctgatttga

SEQ ID NO: 4033 - DNA, 51 bp, Homo sapiens
cacctgaagagaaatgccaggtgagraacccttgactcatttcaaagttct

SEQ ID NO: 4034 - DNA, 51 bp, Homo sapiens
catgaaagtatcagggcttggtaaaygagagtgctttctgtttaattactt

SEQ ID NO: 4035 - DNA, 51 bp, Homo sapiens
cggagacctgtatataaatctgtcaygcaatgctgtaattgtttttaatct

SEQ ID NO: 4036 - DNA, 51 bp, Homo sapiens
ttcatcacaagccctctctcttttayagaattgcctactcctaatattgaa

SEQ ID NO: 4037 - DNA, 51 bp, Homo sapiens
gatcaagagtgatacactattatgcrctacttcctgttacctcctatgtgg

SEQ ID NO: 4038 - DNA, 51 bp, Homo sapiens
tgttgtaagcatccaagtagagataygagtaggcaattgggtatatgagtt

SEQ ID NO: 4039 - DNA, 51 bp, Homo sapiens
agcaaactaagaaaataatcacccamacaagaaagtaagaaaccctaaata

SEQ ID NO: 4040 - DNA, 51 bp, Homo sapiens
ttatttaaagggcatgagatttatgyaggaccaatggaaaatattcactca

SEQ ID NO: 4041 - DNA, 51 bp, Homo sapiens
cagtcccagctgttgagataccccargcctttgagtctcccagctaaggtg

SEQ ID NO: 4042 - DNA, 51 bp, Homo sapiens
cctaagtaggagccaatgaagaagcracacacatgtacttgagtctccaca

SEQ ID NO: 4043 - DNA, 51 bp, Homo sapiens
gtacagaaaaagaagaagtcgaaaaygtaattggattggtaagtgttcccc

SEQ ID NO: 4044 - DNA, 51 bp, Homo sapiens
atgtaaataactggtgaatcttggamaaggatcttcaaaagtttcttttac

SEQ ID NO: 4045 - DNA, 51 bp, Homo sapiens
tctttaattcccacaagttgttgaartatgtatggttttatccttatttta

SEQ ID NO: 4046 - DNA, 51 bp, Homo sapiens
gcatctggtgactcatcaaagaagayacgatctgttccaatactagaggaa

SEQ ID NO: 4047 - DNA, 51 bp, Homo sapiens
ggatatctgatttcatattcaccaastcatacaaatcagaggacacgcagt

SEQ ID NO: 4048 - DNA, 51 bp, Homo sapiens
taagggtgaaaatctatgcacctaaytgacttcacttgctccagtataacc

SEQ ID NO: 4049 - DNA, 51 bp, Homo sapiens
acagctttgtcagaactgctactaastctaggcggaccttgctatgtactt

SEQ ID NO: 4050 - DNA, 51 bp, Homo sapiens
taagcttgtaagtcatctagaaggcmacttcattctttccaaggaaattgg

SEQ ID NO: 4051 - DNA, 51 bp, Homo sapiens
aaaatgcatgcagatgatttagtaayggtgataacagaaataaacaacaag

SEQ ID NO: 4052 - DNA, 51 bp, Homo sapiens
tgccttggggacagttagaatttacrccaccccaatcgtgaggtcaggaga

SEQ ID NO: 4053 - DNA, 51 bp, Homo sapiens
ttcttgctctgcaacttagaagataygtatgttggtcaagtaactaaacct

SEQ ID NO: 4054 - DNA, 51 bp, Homo sapiens
tcaacagcctgatgtgcataggtacrcagttagcccatgccctctagtgtt

SEQ ID NO: 4055 - DNA, 51 bp, Homo sapiens
actaatgaaattgtgaaagtatagtygtcctttaaatgtttgtgcctgaag

SEQ ID NO: 4056 - DNA, 51 bp, Homo sapiens
ctaacaatacccactaagagactacrctaccgagtgctcagattttggcag

SEQ ID NO: 4057 - DNA, 51 bp, Homo sapiens
tttatgttaagaaatcagaaacagawcctttggaaaagcctaatatttttc

SEQ ID NO: 4058 - DNA, 51 bp, Homo sapiens
aaaagtaaaaatggccttgttgaagraattaaatttatgttcaagtgctat

SEQ ID NO: 4059 - DNA, 51 bp, Homo sapiens
aagaataatttggatggccaattagmaatgctcttttgagctggggcattt

SEQ ID NO: 4060 - DNA, 51 bp, Homo sapiens
tgttagtgtggtcactggaattagayggttgtcgactggctaacttccaga

SEQ ID NO: 4061 - DNA, 33 bp, Homo sapiens
ttgatttttcagaccaygtgtactgatccaaag

SEQ ID NO: 4062 - DNA, 51 bp, Homo sapiens
tgaacattttacaaaccatcctagtkaagtctcttcatgtctgtttcctca

SEQ ID NO: 4063 - DNA, 51 bp, Homo sapiens
cgtatattttcaattctcttggacayatacctagaaatggaattgctgagt

SEQ ID NO: 4064 - DNA, 51 bp, Homo sapiens
gatccagagaactctgtgatatgacygaccatcacattagtcttactgata

SEQ ID NO: 4065 - DNA, 51 bp, Homo sapiens
atcctttgtaaacttcttgcatgttwtatggcttttgctgcctagaaattt

SEQ ID NO: 4066 - DNA, 51 bp, Homo sapiens
atataaaaaaaatgcaatcattggargacatagttcaaccaagggtctcaa

SEQ ID NO: 4067 - DNA, 51 bp, Homo sapiens
aaataacggataaatgttaactggaracaactctatttccaaattaagtga

SEQ ID NO: 4068 - DNA, 51 bp, Homo sapiens
atatttttttgaattgacaataataygtgaacatgtgtatgtacatctaaa

SEQ ID NO: 4069 - DNA, 51 bp, Homo sapiens
cgttatgtaatgttcttctttgttcytttctaccattactggtttaaagtt

SEQ ID NO: 4070 - DNA, 51 bp, Homo sapiens
ttacaagtcaatgttctagcagagtraagtcattactggccttaattttca

SEQ ID NO: 4071 - DNA, 51 bp, Homo sapiens
cactgaaaatatgattgtgaattaarggcttttgattaaagtagacttaca

SEQ ID NO: 4072 - DNA, 51 bp, Homo sapiens
acaaaagctttcagtagtcctagtartaatataagatagttttttttaaag

SEQ ID NO: 4073 - DNA, 51 bp, Homo sapiens
actggtgtgtatgtcatttaaattaragaaatgctgtcctaactaagcatt

SEQ ID NO: 4074 - DNA, 51 bp, Homo sapiens
atagccctgtggagcaaccaaaggarcattgctttatattcactgcagaat

SEQ ID NO: 4075 - DNA, 51 bp, Homo sapiens
ccttacattttatttatatacaatargacacattttggatgcaccattact

SEQ ID NO: 4076 - DNA, 51 bp, Homo sapiens
tagaagtaagaattttgtgtgattayagggctattactacaccatctaaca

SEQ ID NO: 4077 - DNA, 51 bp, Homo sapiens
acatattagatattttacctgataaytgataaagaatacatcgcactgccc

SEQ ID NO: 4078 - DNA, 51 bp, Homo sapiens
gggcttattatgtgaattaggtacartgggatccagcatcatatacagacc

SEQ ID NO: 4079 - DNA, 51 bp, Homo sapiens
gaccctgtgtctttcttattctgaayctcgtcagggtccagaatgaggtct

SEQ ID NO: 4080 - DNA, 51 bp, Homo sapiens
tcatcatgagcatacaaactacacaytcatagacagcatgaaggtaagaaa

SEQ ID NO: 4081 - DNA, 51 bp, Homo sapiens
ataccaacaggtagatagagaacggrcagtaaatattgatgaagttaaata

SEQ ID NO: 4082 - DNA, 51 bp, Homo sapiens
gcttaatagacagagaaatttgggcyatgttcagaagaagagtgttttgta

SEQ ID NO: 4083 - DNA, 51 bp, Homo sapiens
tgaacagaggcacacataaatttacsagactttgacaaagcaatacatttg

SEQ ID NO: 4084 - DNA, 51 bp, Homo sapiens
actagactcaatattttaccacacartctacattacaggatgaaaacaaaa

SEQ ID NO: 4085 - DNA, 51 bp, Homo sapiens
aacatactctccaaatctgagacaaytcatccaagcagtgtgtttcctttt

SEQ ID NO: 4086 - DNA, 51 bp, Homo sapiens
agccgggaaaaaggtggcgccctaayacggtgcccctcgaatgcattgtgg

SEQ ID NO: 4087 - DNA, 51 bp, Homo sapiens
atttcactccttttgttacatttacscgataggattctaaatcccttctct

SEQ ID NO: 4088 - DNA, 51 bp, Homo sapiens
ttcagaggatatgttttaggaggtgkattgttccattttatatatatatga

SEQ ID NO: 4089 - DNA, 51 bp, Homo sapiens
acaggctatgtcattttttcaatacmaagccctgtgaaatgggtactatca

SEQ ID NO: 4090 - DNA, 51 bp, Homo sapiens
tgaaaaaatgacatagcctgtgtcartctctagcatttggtaagtactcaa

SEQ ID NO: 4091 - DNA, 51 bp, Homo sapiens
actgtcaagtggaaacatgaacctamaatggtgataaaattgtatagaact

SEQ ID NO: 4092 - DNA, 51 bp, Homo sapiens
tttataaaaaaatataatctatcgcrataccctttttatataggggaaaca

SEQ ID NO: 4093 - DNA, 51 bp, Homo sapiens
ttataggacccaaaagtggcttagcrcccttaattgcctgccttagagcac

SEQ ID NO: 4094 - DNA, 51 bp, Homo sapiens
ttatgtaaatgtattataatagctargagacaaccatttgcataataataa

SEQ ID NO: 4095 - DNA, 51 bp, Homo sapiens
ataatatacaatgtgtgttttcagartccaccagcatagaggaaacaatca

SEQ ID NO: 4096 - DNA, 51 bp, Homo sapiens
ttaagagaaatttgattgatctcagwaatataatactttttttgtttaata

SEQ ID NO: 4097 - DNA, 51 bp, Homo sapiens
agctaaaggtgcaactcttgacctaytaaatgacaacaaataccatacggg

SEQ ID NO: 4098 - DNA, 51 bp, Homo sapiens
aataacagaatgtgatgagtccttaygcctgcttgaagaatgctgcatcat

SEQ ID NO: 4099 - DNA, 51 bp, Homo sapiens
tggggttcaagcagttttattttgaygaatctccaaaggtgatctagaaat

SEQ ID NO: 4100 - DNA, 51 bp, Homo sapiens
ttactaagtgatttataactgttaargtgatcgaagaaggtaatttagcct

SEQ ID NO: 4101 - DNA, 51 bp, Homo sapiens
taaattatgcctgagtacggagaacrgattattttgtttcattaaatcttg

SEQ ID NO: 4102 - DNA, 51 bp, Homo sapiens
atcgatgtgacatattagtctatgayataaaacattcagtgaatgcacttt

SEQ ID NO: 4103 - DNA, 51 bp, Homo sapiens
ttccaggctgcacagcttgtggctcsaaaaaagactccttccttttgctcc

SEQ ID NO: 4104 - DNA, 51 bp, Homo sapiens
attagtagtgaacaggggacattcasattaaaatattgtctacattatata

SEQ ID NO: 4105 - DNA, 51 bp, Homo sapiens
gtctcttatatatgataattttctaygggtaatttgacatgtatttgtagc

SEQ ID NO: 4106 - DNA, 51 bp, Homo sapiens
gaagtgattctgatatttgttgaaawttaagagccatttgttttacttatc

SEQ ID NO: 4107 - DNA, 51 bp, Homo sapiens
ataataatgctagtagtatatgatargtaaaacaaatggctcttaaatttc

SEQ ID NO: 4108 - DNA, 51 bp, Homo sapiens
tggcataaagcttgaatattatctaygtttacctaacactgtagctctgtt

SEQ ID NO: 4109 - DNA, 51 bp, Homo sapiens
ataaaattagaaatgaaagggaagayattatagcagagaaatacaggttag

SEQ ID NO: 4110 - DNA, 51 bp, Homo sapiens
tcctacccaagtgttactggtggaaygtcatgactatcagttgtccaggtt

SEQ ID NO: 4111 - DNA, 51 bp, Homo sapiens
caatagtctggaacaaaggatattasaataattgctgttgctgctacctaa

SEQ ID NO: 4112 - DNA, 51 bp, Homo sapiens
agaagcaatgctcatgatgactaaamtgttctaagaagccattttccccct

SEQ ID NO: 4113 - DNA, 51 bp, Homo sapiens
gtaaaatggggtgtccaggtctaggraattgtcaaaataaaactggggaga

SEQ ID NO: 4114 - DNA, 51 bp, Homo sapiens
aatatgagcagtattctatcaataaycttgattgttcttggaaataccata

SEQ ID NO: 4115 - DNA, 51 bp, Homo sapiens
gttcttgtgagtttaagaaaaatacycggtctcattgattctaagaagcat

SEQ ID NO: 4116 - DNA, 51 bp, Homo sapiens
gtaataataatatgttacaagctaaygccgactcttctctatccccaagat

SEQ ID NO: 4117 - DNA, 51 bp, Homo sapiens
ccttcccagtcatctcatcacaaaayctaatagagtgttgaaggcactgaa

SEQ ID NO: 4118 - DNA, 51 bp, Homo sapiens
ttagtaatgtcctttattttcttctraattctgtaggacctgtagttatat

SEQ ID NO: 4119 - DNA, 51 bp, Homo sapiens
tcttgactaatataaaatgtatcaastcatttccaaattaaggattattaa

SEQ ID NO: 4120 - DNA, 51 bp, Homo sapiens
tctaccaaatattaaatcatacttcmatcttcagtattccagttcacaaac

SEQ ID NO: 4121 - DNA, 51 bp, Homo sapiens
tagtagctctaaggatacggacagamtatgatgaaaagatgaatatgtaca

SEQ ID NO: 4122 - DNA, 51 bp, Homo sapiens
ggagggaaacaatgaggatcttcaayttagactgagaaaagcacactaatg

SEQ ID NO: 4123 - DNA, 51 bp, Homo sapiens
ataaattggaaaggcagagtgttccrgagataaggagtcagactttggagt

SEQ ID NO: 4124 - DNA, 51 bp, Homo sapiens
atgacaaccaagcacacatttgatastacagtactaagaaagatttggggc

SEQ ID NO: 4125 - DNA, 51 bp, Homo sapiens
ctcccggattaggttgtaaacattayggcactgctttgctgtcagtttgaa

SEQ ID NO: 4126 - DNA, 51 bp, Homo sapiens
ctgaagtgcctcccatgctccatgamataattgcttttgaatgaccctaag

SEQ ID NO: 4127 - DNA, 51 bp, Homo sapiens
gaaaaataggaggcttttaacgccartacatgaccagacagccagtgaact

SEQ ID NO: 4128 - DNA, 51 bp, Homo sapiens
gagaatttatacaagtgccgaataartgcagtcactgttgtttagtaccct

SEQ ID NO: 4129 - DNA, 51 bp, Homo sapiens
attcttttatatagctttgtaagcarcgttatgcaaggtttaaaaatttaa

SEQ ID NO: 4130 - DNA, 51 bp, Homo sapiens
cattccggtgtctcacatttgcccayggactttactataatcatcaggact

SEQ ID NO: 4131 - DNA, 51 bp, Homo sapiens
tacccagtctaaattgaactcattarcttgcctccaaaagagcctagtcct

SEQ ID NO: 4132 - DNA, 51 bp, Homo sapiens
tgattcctgcaatccaagttggctasaaaaaagggccttcacattacaatt

SEQ ID NO: 4133 - DNA, 51 bp, Homo sapiens
ctaacctttacagtacactttcccartggaatatacagtctgtgtaccaag

SEQ ID NO: 4134 - DNA, 51 bp, Homo sapiens
gaataacttttaaaatgtaaaaaccmgggcatgttctttgtaaagtgttca

SEQ ID NO: 4135 - DNA, 51 bp, Homo sapiens
ttaaaaattttagtctataattccascttgttataatcttttggattcacc

SEQ ID NO: 4136 - DNA, 51 bp, Homo sapiens
tcaaattcaacatgatcaaaactgcrtgatcttctgctgagcctggttcct

SEQ ID NO: 4137 - DNA, 51 bp, Homo sapiens
tccctcttattagactaaactttgayattataccattatttccttttgaga

SEQ ID NO: 4138 - DNA, 51 bp, Homo sapiens
ctggatctcacatactatcccttgaraccaaaggacacactttagagcaaa

SEQ ID NO: 4139 - DNA, 51 bp, Homo sapiens
gagtgtgtgagaagacgagactggamatgtaggttagttgcaagttgctaa

SEQ ID NO: 4140 - DNA, 51 bp, Homo sapiens
aaagctttacagattgaccttcttamtaaccaccaactcacttctctcatt

SEQ ID NO: 4141 - DNA, 51 bp, Homo sapiens
atttatgggaggtgaaacaatgttaygtatcaggaaaaaggaaggtttctc

SEQ ID NO: 4142 - DNA, 51 bp, Homo sapiens
ttaagaaagaacgctcaaagccacaragattgtaaagggctgactgagaat

SEQ ID NO: 4143 - DNA, 51 bp, Homo sapiens
gaaaaggaatgagtggataatgcaasattaaaggtacagaaaaggaaatag

SEQ ID NO: 4144 - DNA, 51 bp, Homo sapiens
ctctgggacagtctcaggtttagagmatttacctgcaatcacagttgtatg

SEQ ID NO: 4145 - DNA, 51 bp, Homo sapiens
gtaggcagtttttatctatacataartcatttgttcaaccatggtgaataa

SEQ ID NO: 4146 - DNA, 51 bp, Homo sapiens
tggagaagcaacagcggatttcaacrcccaggacggaccaggtagggagga

SEQ ID NO: 4147 - DNA, 51 bp, Homo sapiens
cacttagaacactctggctacaaggraaataatcaataaatagagtttcca

SEQ ID NO: 4148 - DNA, 51 bp, Homo sapiens
attttaattaaaattgaggcattagwattgaaacttgtgcaaagaaaaata

SEQ ID NO: 4149 - DNA, 51 bp, Homo sapiens
ggggttttaacatattgttagccaaygcaaaatatatgggaattggaataa

SEQ ID NO: 4150 - DNA, 51 bp, Homo sapiens
agcagttgcttataacatcataatamaaaaagatatttttaactggcaaat

SEQ ID NO: 4151 - DNA, 51 bp, Homo sapiens
cttccttctagactcaataatttagsaagagatagacacttgtgccaaact

SEQ ID NO: 4152 - DNA, 51 bp, Homo sapiens
cacctacgcttgaagatccatatacraactatgaaattctcatgaagaatc

SEQ ID NO: 4153 - DNA, 51 bp, Homo sapiens
gtgtacagtgaacatatttgaattawgttgagtaaattacattaagcagat

SEQ ID NO: 4154 - DNA, 51 bp, Homo sapiens
cattatctgatggagttaatggttasagagctaaacagtgcacttcaaaca

SEQ ID NO: 4155 - DNA, 51 bp, Homo sapiens
agttttttatttgtttattggtgtgragattaatatgtgattccataacac

SEQ ID NO: 4156 - DNA, 51 bp, Homo sapiens
atgtttgttgttttatagttttcaasagtgagcatgtaccatattttgctc

SEQ ID NO: 4157 - DNA, 51 bp, Homo sapiens
gatgtcttcaatgattttgttcttamatgatgtgacttttttttttttttt

SEQ ID NO: 4158 - DNA, 51 bp, Homo sapiens
ttttgaaaataatctatgaatttctraaagacagaagaaagaatgttttta

SEQ ID NO: 4159 - DNA, 51 bp, Homo sapiens
ggactatgtctgccaatatcttctaygtgcccagaaatcatagttgcttaa

SEQ ID NO: 4160 - DNA, 51 bp, Homo sapiens
gaataaagtttcctatacctaaggckagtacagaattctaacacagatgaa

SEQ ID NO: 4161 - DNA, 51 bp, Homo sapiens
ctactgaaaattagctgggaactgaygttaatttcagggactcgctgtggc

SEQ ID NO: 4162 - DNA, 51 bp, Homo sapiens
tgaccaatctgataattaatgaaaayggagcaatttggcaactaataaaga

SEQ ID NO: 4163 - DNA, 51 bp, Homo sapiens
tccttgccccaccgaatactttctakgccttcttcctcaaactcgctgtgc

SEQ ID NO: 4164 - DNA, 51 bp, Homo sapiens
atttgagtgtacctatattaaaataygtcaagtgcggaacatttctagaaa

SEQ ID NO: 4165 - DNA, 51 bp, Homo sapiens
ttgttcaaagaaagaagtatatatartaaacatgaatagatctaagtggat

SEQ ID NO: 4166 - DNA, 51 bp, Homo sapiens
agagaccctgtctcaataataataayagttccaacggccaacatttgcaac

SEQ ID NO: 4167 - DNA, 51 bp, Homo sapiens
gggcttgggggaataagcagaaagarctgttttacagtacctcaaagacca

SEQ ID NO: 4168 - DNA, 51 bp, Homo sapiens
tgcaatgaaggtttcaaggtgaagamcaactccagtaaagagcttggtgga

SEQ ID NO: 4169 - DNA, 51 bp, Homo sapiens
attgcttcttcctttttagccttcgwattccatgtatttaaccagtccccc

SEQ ID NO: 4170 - DNA, 51 bp, Homo sapiens
ttgataaggactttgtagtcttgtamcatttctctcctttccatctccagg

SEQ ID NO: 4171 - DNA, 51 bp, Homo sapiens
tattaaatatgaaaaattatatcgartatgaaaaattatagagaatctgaa

SEQ ID NO: 4172 - DNA, 51 bp, Homo sapiens
tgactaccgccttattagagagtcartactttccgtacccagattcatgtt

SEQ ID NO: 4173 - DNA, 51 bp, Homo sapiens
cttatttttgctaaagtggtccacgkacaaaaaatatttgagggctatcgc

SEQ ID NO: 4174 - DNA, 51 bp, Homo sapiens
acacaaatagaagaacatttgagacrgtcattaattaacaaagacttcttg

SEQ ID NO: 4175 - DNA, 51 bp, Homo sapiens
aaacatgaataggaaacatctggaaygagaaagaatataactacaaatacc

SEQ ID NO: 4176 - DNA, 51 bp, Homo sapiens
agttaattatcttttctcacacttaygggttatttgcactgtttttctttt

SEQ ID NO: 4177 - DNA, 51 bp, Homo sapiens
tgactctaaatccagcccatctttamaattctgctcaaattccatctcttt

SEQ ID NO: 4178 - DNA, 51 bp, Homo sapiens
aaaaagatatcatcatcggagcctcyacatttttaaatacacattttatat

SEQ ID NO: 4179 - DNA, 51 bp, Homo sapiens
aaccatgcgcctgaccaactgacaasctgggaatacaaagagtagatctaa

SEQ ID NO: 4180 - DNA, 51 bp, Homo sapiens
gtgagcagtggtctaggtctaaggamgatccaaagtgacaatgttcctgtt

SEQ ID NO: 4181 - DNA, 51 bp, Homo sapiens
ctttcaaaagtgatatataagatacygatgaagataatgggaaatggggtg

SEQ ID NO: 4182 - DNA, 51 bp, Homo sapiens
tctcttaaggatctggtaaggctaawgcgtaatttgacaggaaaagcatgg

SEQ ID NO: 4183 - DNA, 51 bp, Homo sapiens
tccagaatgacagctttgatggtatyagtaactggccagaagtcgtcagta

SEQ ID NO: 4184 - DNA, 51 bp, Homo sapiens
gtgcagatttatttaataaatattasctattgtctgctacagactgtgtca

SEQ ID NO: 4185 - DNA, 51 bp, Homo sapiens
ataaatgtgtatacagactcctaagyagtatttaatcaactggcaggtcta

SEQ ID NO: 4186 - DNA, 51 bp, Homo sapiens
acagtttgccacattaggatgccaastgcaattttgtcataagactgttta

SEQ ID NO: 4187 - DNA, 51 bp, Homo sapiens
agcttaaaatagaacccatcagtcaytagttgaagtaaaatctttcttatt

SEQ ID NO: 4188 - DNA, 51 bp, Homo sapiens
ccatttcaccatatatgttatgatakctagtcattaaaacgtagctgtcag

SEQ ID NO: 4189 - DNA, 51 bp, Homo sapiens
aaggaaccattaatttcttcctatawgatccaaagctattaaataagaaag

SEQ ID NO: 4190 - DNA, 51 bp, Homo sapiens
aaatatatttgtaatatgaactatasaagtaccgactaggctctggcactt

SEQ ID NO: 4191 - DNA, 51 bp, Homo sapiens
aatccttgagcaccgtatctggcaartaatgaatgcttaatatatgtagct

SEQ ID NO: 4192 - DNA, 51 bp, Homo sapiens
ttctatagaaatcaatttttaaaatyacttacttgtgctttgaccaattcg

SEQ ID NO: 4193 - DNA, 51 bp, Homo sapiens
tgcattcatatctctcattatatacraaaattaagatagattaaagatttt

SEQ ID NO: 4194 - DNA, 51 bp, Homo sapiens
tctaggatatcatttaagctaaaacwtactaacacatgacttaaccagagt

SEQ ID NO: 4195 - DNA, 51 bp, Homo sapiens
acttatgattttttatttcctggatyaatatagcatgtgaatacttctaaa

SEQ ID NO: 4196 - DNA, 51 bp, Homo sapiens
ccagaaaggtgaatagtgttagacargcatacatttgccatcttttaaaca

SEQ ID NO: 4197 - DNA, 51 bp, Homo sapiens
gaaattcagaggcagagttacccaayagtagtaaaatagacctatagctcc

SEQ ID NO: 4198 - DNA, 51 bp, Homo sapiens
tagtatgaaataagctcaacctttgraatagagtcatataaaatttggtgg

SEQ ID NO: 4199 - DNA, 51 bp, Homo sapiens
caagagtcattttgtagcaaacaagratatagagaggactagaattattta

SEQ ID NO: 4200 - DNA, 51 bp, Homo sapiens
aaagaataccttattttttaatagcraaagatctcttagaaggggttctta

SEQ ID NO: 4201 - DNA, 51 bp, Homo sapiens
aaaagtacaattcataattttttatragtatgattgtgaaggatggtctgt

SEQ ID NO: 4202 - DNA, 51 bp, Homo sapiens
gtgggtcaaaccttaaaattaagcaygagcagcagtcttggctacctgatg

SEQ ID NO: 4203 - DNA, 51 bp, Homo sapiens
aataagaaatgctctataaaatctcrctcgaatgaagatgatctggatagt

SEQ ID NO: 4204 - DNA, 51 bp, Homo sapiens
gaatatgagcttagcataaatagaartaaggactgcagattagacagaaac

SEQ ID NO: 4205 - DNA, 51 bp, Homo sapiens
tgctttattcttctaagattgacaasatacagtggtgttaaaagaaagcct

SEQ ID NO: 4206 - DNA, 51 bp, Homo sapiens
atatttaggatgttgcttgagcatakaataaaaaatgtttaataattaact

SEQ ID NO: 4207 - DNA, 51 bp, Homo sapiens
aagaatagactattaacaacaaagayatatttaggatgttgcttgagcata

SEQ ID NO: 4208 - DNA, 51 bp, Homo sapiens
tgagttatatactttctgcccttcakatttcatataccttgtacctctgtt

SEQ ID NO: 4209 - DNA, 51 bp, Homo sapiens
tttttaaattaaaaaaattatttatsaaattaactgtcttcaaaaatctag

SEQ ID NO: 4210 - DNA, 51 bp, Homo sapiens
caatattaactgaatggatcaaacartggtgaaaaattgagttatctgact

SEQ ID NO: 4211 - DNA, 51 bp, Homo sapiens
ggactttcataatgctggaaatagamgctcgtaaaatctttttcttattaa

SEQ ID NO: 4212 - DNA, 51 bp, Homo sapiens
agagaaggtggctgccaatgactaaratataaaaaaggccacaaaggagaa

SEQ ID NO: 4213 - DNA, 51 bp, Homo sapiens
tgtctcctgtggccccagattccaaygcttaacatctgtgatctccccatc

SEQ ID NO: 4214 - DNA, 51 bp, Homo sapiens
acggaagcagacaactcatttcttcrctaattcaaaatgagatagtaatat

SEQ ID NO: 4215 - DNA, 51 bp, Homo sapiens
aggcctttccatacagaaatgtggaygtaaactgaagcgatccatataact

SEQ ID NO: 4216 - DNA, 51 bp, Homo sapiens
taaagttattcagattcccacttgartatacttgagaaaacaatattttta

SEQ ID NO: 4217 - DNA, 51 bp, Homo sapiens
atccacaacagaattttattcctgtraatgttttcaatctccaactttacc

SEQ ID NO: 4218 - DNA, 51 bp, Homo sapiens
ctttagagggaaaaatatagttccaytctagttgataagataaaccaccac

SEQ ID NO: 4219 - DNA, 51 bp, Homo sapiens
tggagacaggctcaactcccgaatcrcgtggcatgttgactaccaacagct

SEQ ID NO: 4220 - DNA, 51 bp, Homo sapiens
cctcaaccctttttggaatgatatakgtcataaaaactagcagcgtagttg

SEQ ID NO: 4221 - DNA, 51 bp, Homo sapiens
aaaacatacatcagtacatacaacgyaaagtcttggtcacgttactgctgt

SEQ ID NO: 4222 - DNA, 51 bp, Homo sapiens
aaacagaaaggtaggattataaccamaaagggcctttcttcgcttcagcat

SEQ ID NO: 4223 - DNA, 51 bp, Homo sapiens
tataaggtagcagatattgtaagatmaagatgagctgtgaatcagacagac

SEQ ID NO: 4224 - DNA, 51 bp, Homo sapiens
ttcaaagccctttgcaagtcaacaarcctaagattcattataggaaaagaa

SEQ ID NO: 4225 - DNA, 51 bp, Homo sapiens
atattatatgaggctgacatatacawatcaaatccattgtcaaaacaatga

SEQ ID NO: 4226 - DNA, 51 bp, Homo sapiens
gataaacccgcatgccctaagtaaaygttgcagagtaattaagctgagaga

SEQ ID NO: 4227 - DNA, 51 bp, Homo sapiens
attttaagcttcttgaatacagagamcagattcaacattcattgttgtctt

SEQ ID NO: 4228 - DNA, 51 bp, Homo sapiens
ggagttacattttgttgaatttagaragcaatttatgtggatgttaccata

SEQ ID NO: 4229 - DNA, 51 bp, Homo sapiens
tattatgacactaatggatattctcmaggtgtttttcactatcaagaaaat

SEQ ID NO: 4230 - DNA, 51 bp, Homo sapiens
gcttctattatcttctaactgataasgtgcatacattgttagtatttttcc

SEQ ID NO: 4231 - DNA, 51 bp, Homo sapiens
atatattttactatagcagaaacaargtcgagaacaatacctaccagggaa

SEQ ID NO: 4232 - DNA, 51 bp, Homo sapiens
ggaaaccttagtgggacactgaaaartgagttaatgttaaataaggagttg

SEQ ID NO: 4233 - DNA, 51 bp, Homo sapiens
ttctggtttgcttgttagtcattacmatcaaacaataccaagtcactaaaa

SEQ ID NO: 4234 - DNA, 51 bp, Homo sapiens
ttcacatccacttaaaggagagaacrcatcttgcaaaatttcatggaatga

SEQ ID NO: 4235 - DNA, 51 bp, Homo sapiens
tttataggattaagtgtcaatgaagmacaaattgagaaatactggtttaaa

SEQ ID NO: 4236 - DNA, 51 bp, Homo sapiens
cttgcaaaatcactatttcatattcycttttctctaagttgatgttttctt

SEQ ID NO: 4237 - DNA, 51 bp, Homo sapiens
aaaggtttatacacatcaggacatgsagagtaaatctgtttatgacatgaa

SEQ ID NO: 4238 - DNA, 51 bp, Homo sapiens
tgaagcccaggtaagtgcatatctcrctgtatataataataagcatagatg

SEQ ID NO: 4239 - DNA, 51 bp, Homo sapiens
tttcttttataaatttggactttaartaagagtactttataaaaatgtcta

SEQ ID NO: 4240 - DNA, 51 bp, Homo sapiens
gatcctgatgagtcctctaaacaaartccaaagaagaggattggctcaaca

SEQ ID NO: 4241 - DNA, 51 bp, Homo sapiens
gggaggtggccttgtagattgtgagrcaggttcaggaacaaggagaggctg

SEQ ID NO: 4242 - DNA, 51 bp, Homo sapiens
tgcatacaatatacaacaatcaaatwagagtaattaggatatccatcacct

SEQ ID NO: 4243 - DNA, 51 bp, Homo sapiens
atcaccccactgtgctagcaaacacyacaatttattccttctgtttttgta

SEQ ID NO: 4244 - DNA, 51 bp, Homo sapiens
tgactggcagggagcttaataaatcsaggctgttctcattacctgtgtttg

SEQ ID NO: 4245 - DNA, 51 bp, Homo sapiens
ccaaggagatttgttaaaagggtacsattgtcctgtgatctagagtagcaa

SEQ ID NO: 4246 - DNA, 51 bp, Homo sapiens
tacatgcctaggataatgctgtatayggtaggctggagatctcagtgctag

SEQ ID NO: 4247 - DNA, 51 bp, Homo sapiens
gtcacaatttacatatttttatatcrcatatttcttagcaacttaatgtag

SEQ ID NO: 4248 - DNA, 51 bp, Homo sapiens
tttatcagttaggcacgagtgacagraatcccaattcatagtgttaagcaa

SEQ ID NO: 4249 - DNA, 51 bp, Homo sapiens
ttccatttaacacaaattatagtcaycctagttgttgtgaagtggtatcaa

SEQ ID NO: 4250 - DNA, 51 bp, Homo sapiens
ctctctggagaattctaaaaagagaractccctggtcatgtcctgtagtgg

SEQ ID NO: 4251 - DNA, 51 bp, Homo sapiens
accctttctgccatataaggtaatayacacagattccaggaatttgaatgt

SEQ ID NO: 4252 - DNA, 51 bp, Homo sapiens
tgctaagcctgggaatacagctgtgmaacagacaaacatggtcgtggtttg

SEQ ID NO: 4253 - DNA, 51 bp, Homo sapiens
actataatgtttttaaaaggtaagayaccacatagaatagtaataagttct

SEQ ID NO: 4254 - DNA, 51 bp, Homo sapiens
atttactatgtttttgaaaaccgcargcagcaatttatagaaaagattagg

SEQ ID NO: 4255 - DNA, 51 bp, Homo sapiens
ttatcttgctgtgatgttagtgcatytcatggatacaatctcatggttgag

SEQ ID NO: 4256 - DNA, 51 bp, Homo sapiens
tttgcattaaacatcatgataaatamaatacaggcttcaaatttcatagat

SEQ ID NO: 4257 - DNA, 51 bp, Homo sapiens
atttctgtaggatatttatgcaaaaktaacagattacagaaccagttcaga

SEQ ID NO: 4258 - DNA, 51 bp, Homo sapiens
cgccagcttctgcttccactgtagayactttgatgatgattcttttggaat

SEQ ID NO: 4259 - DNA, 51 bp, Homo sapiens
tgtatattagctgatctattttagargccattgctccagttttatcctaga

SEQ ID NO: 4260 - DNA, 51 bp, Homo sapiens
actggaatttttttggttatccactsacatgcaatttgacaaccataatat

SEQ ID NO: 4261 - DNA, 51 bp, Homo sapiens
tcagaactttcccacccacctacatmagacattgaggatgcctgacctggg

SEQ ID NO: 4262 - DNA, 51 bp, Homo sapiens
gaaaacatttgactgagcaatactcyatgttatttttaaagggcatgttgt

SEQ ID NO: 4263 - DNA, 51 bp, Homo sapiens
aacacaaagttataatttactgtgaragacagctgtgaatctatcattcaa

SEQ ID NO: 4264 - DNA, 51 bp, Homo sapiens
agagattagtgatcacatagagtgargtttgggaatctgtatttttaaatc

SEQ ID NO: 4265 - DNA, 51 bp, Homo sapiens
caaaacttcatcaatcttagaacctwaccaaactgaattggtttatcgtaa

SEQ ID NO: 4266 - DNA, 51 bp, Homo sapiens
taataaatcctccaagtaggaatcayctttctagcataatcttttaatggt

SEQ ID NO: 4267 - DNA, 51 bp, Homo sapiens
caaaagactgcttgaaataatgttayagtcacttgaggaagattaaaacat

SEQ ID NO: 4268 - DNA, 51 bp, Homo sapiens
taacatatgatattcaaatattacaytaactgaaaacattctctattagag

SEQ ID NO: 4269 - DNA, 51 bp, Homo sapiens
taaagatgaattataacatacttcamgggcaatcagtaaattgagagaaca

SEQ ID NO: 4270 - DNA, 51 bp, Homo sapiens
ttcctcccattctttcatccacctaygtttaatccatcttaagttctatgg

SEQ ID NO: 4271 - DNA, 51 bp, Homo sapiens
tattaacgattcttgcttgcaacaastattactgaggtgttagccaagtag

SEQ ID NO: 4272 - DNA, 51 bp, Homo sapiens
catttgttcaggtaattataccctaygtcctttcaaaatgatttgaatttt

SEQ ID NO: 4273 - DNA, 51 bp, Homo sapiens
agggaggaaacaaatctgacaatcaraaagagattgactgtggtttattag

SEQ ID NO: 4274 - DNA, 51 bp, Homo sapiens
taaaattaaacttcctaataagaaasgtcacgtaagtgaaattaaagtata

SEQ ID NO: 4275 - DNA, 51 bp, Homo sapiens
agttactgtttttctctaagagatcraataatttcagtgctgagaccaaat

SEQ ID NO: 4276 - DNA, 51 bp, Homo sapiens
ctctgactagattaataaggacaaaraaaaggcacaagtaaccgcattaca

SEQ ID NO: 4277 - DNA, 51 bp, Homo sapiens
gtgctgctgttcagataaaacatttkgaaagtgacagttcaaaatacattc

SEQ ID NO: 4278 - DNA, 51 bp, Homo sapiens
gtaccttttgctaatcaactggattrattggatgctttacaaaggtttaac

SEQ ID NO: 4279 - DNA, 51 bp, Homo sapiens
agcacgtttttgttaactacagtcaytgacgttatttcttctaccttactg

SEQ ID NO: 4280 - DNA, 51 bp, Homo sapiens
gccttattaacataaatagtggatartaaccagcatcttcctaagcaaaac

SEQ ID NO: 4281 - DNA, 51 bp, Homo sapiens
ctggttcttactcttaaaaagctcartctatcaaaggtaggccaggctact

SEQ ID NO: 4282 - DNA, 51 bp, Homo sapiens
gtcctctgtaccttgttggctgtccrgatatttcaaataaacatcaatttc

SEQ ID NO: 4283 - DNA, 51 bp, Homo sapiens
tttcatagaaataatctcagttcaastattgatgatatctagctggtatga

SEQ ID NO: 4284 - DNA, 51 bp, Homo sapiens
agaaaaaagtcactgcctgacaataygcttacctggcagcttacaaatcta

SEQ ID NO: 4285 - DNA, 51 bp, Homo sapiens
ctaaatgtgtagaaagctatatccargaaatttaaatcaatcgtatgagga

SEQ ID NO: 4286 - DNA, 51 bp, Homo sapiens
tctcttccacctttcagtcttaacartaatgataatgtaaagcaatacatc

SEQ ID NO: 4287 - DNA, 51 bp, Homo sapiens
atttttgaacatactatacttgtcasgctctcactgtatgattgccacttt

SEQ ID NO: 4288 - DNA, 51 bp, Homo sapiens
agccaacacacacagtaattattatytccaaaccaatatctaaacacattt

SEQ ID NO: 4289 - DNA, 51 bp, Homo sapiens
ctctttacaacaaagagaaaaatacycaatgttgcctgcaagtaagtgtac

SEQ ID NO: 4290 - DNA, 51 bp, Homo sapiens
gcaaagaaaaattactggggaataartgtacaagtctatgaataactgctt

SEQ ID NO: 4291 - DNA, 51 bp, Homo sapiens
ttcctttacttctccatgtaaataaycatactagtaaatttataggaggcc

SEQ ID NO: 4292 - DNA, 51 bp, Homo sapiens
tatgtcttaacaattttaatcagaaytcatatgacgtgaacagcatttttt

SEQ ID NO: 4293 - DNA, 51 bp, Homo sapiens
acagattacggttttgagatttatartacaacctggggcaatgaagaaaaa

SEQ ID NO: 4294 - DNA, 51 bp, Homo sapiens
caaagggagaaatgattgagaaatayacctgcttggaactagaggaacatc

SEQ ID NO: 4295 - DNA, 51 bp, Homo sapiens
atgtttaattgtattccttttaacaktcctttaaccatattccttttcata

SEQ ID NO: 4296 - DNA, 51 bp, Homo sapiens
cctaggatacattatataatactaaytgatatccattttgagtattatatc

SEQ ID NO: 4297 - DNA, 51 bp, Homo sapiens
tgtacatcactgattactaccctgaygacttctctattcaggcccggaagt

SEQ ID NO: 4298 - DNA, 51 bp, Homo sapiens
tacattaatcaacaatgcattccacygtaagtatctgagctggatatttaa

SEQ ID NO: 4299 - DNA, 51 bp, Homo sapiens
attacaaaaattttgatgtatttcaraaaaacttatgagctaatgtgacta

SEQ ID NO: 4300 - DNA, 51 bp, Homo sapiens
ctccacaattacatcaatggctaacyatcaagagagaagatctcccacatg

SEQ ID NO: 4301 - DNA, 51 bp, Homo sapiens
aaatttttggacccactaggattgtyaataaatctactctacatgtgggag

SEQ ID NO: 4302 - DNA, 51 bp, Homo sapiens
aatggaaataaagagcttggcatatsataggctaccaaagacaagcgtcat

SEQ ID NO: 4303 - DNA, 51 bp, Homo sapiens
attttctctagcccactccaggtaamtgaactaattttcaacccccaaaaa

SEQ ID NO: 4304 - DNA, 51 bp, Homo sapiens
ctgacttaaggccactctctcactaygaatctcattgctgcctcataatat

SEQ ID NO: 4305 - DNA, 51 bp, Homo sapiens
aagagacatttgacaacctaatatcratggcttgaacaatggctttactaa

SEQ ID NO: 4306 - DNA, 51 bp, Homo sapiens
aaaaggaaatcgtagagacactaaamaattacttgcagctgtctttacaaa

SEQ ID NO: 4307 - DNA, 51 bp, Homo sapiens
aattcgaggtattacagcctcaagayaaaagccttctaatgagtgaatttt

SEQ ID NO: 4308 - DNA, 51 bp, Homo sapiens
attttgtgatgctgactggtatggasaagaaatagggcaatctgaatgaaa

SEQ ID NO: 4309 - DNA, 51 bp, Homo sapiens
tcttctcctcctgcttattagcataygaaagagaagttatttattttgagt

SEQ ID NO: 4310 - DNA, 51 bp, Homo sapiens
tttctaagactcagtttcatggttawatcccacatcagggactcaatttta

SEQ ID NO: 4311 - DNA, 51 bp, Homo sapiens
taaaatgctaactgtgttatacttayactcaagggatccccgggtacaaat

SEQ ID NO: 4312 - DNA, 51 bp, Homo sapiens
agtttctatttcttcatctggaaaayagtccttgttacagctgccctgatt

SEQ ID NO: 4313 - DNA, 51 bp, Homo sapiens
ctgtcttcaacatgagggatacagayagcttctttactgttgtagggaaat

SEQ ID NO: 4314 - DNA, 51 bp, Homo sapiens
atcatatttagtatattatttgatakgtatgataaagttcagaaaagctta

SEQ ID NO: 4315 - DNA, 51 bp, Homo sapiens
acaatggatatgattgaacaattcarctggagtatccaaaaacgtatgaca

SEQ ID NO: 4316 - DNA, 51 bp, Homo sapiens
caaagtctggacaagaaaccaacacsgtatttacatgatcctcaatttctg

SEQ ID NO: 4317 - DNA, 51 bp, Homo sapiens
ggatttctgcctttgctacttgccaygtttgtgaagtctcctaccctttgt

SEQ ID NO: 4318 - DNA, 51 bp, Homo sapiens
ttcagtttcacaaatgggtgtcaaamgcatgccaaaataatataatcgtta

SEQ ID NO: 4319 - DNA, 51 bp, Homo sapiens
aaggaaaaagccagatctctctttaracaggaccaaattatttgctaagca

SEQ ID NO: 4320 - DNA, 51 bp, Homo sapiens
acaatgtgcagtctctgaacataaayagttgatagccagcacttgtatgac

SEQ ID NO: 4321 - DNA, 51 bp, Homo sapiens
ttcgattacacgacaatgaaaaacayggactattttcctgtggcacatgga

SEQ ID NO: 4322 - DNA, 51 bp, Homo sapiens
acagccaaccggatcggctgaagagmaattaggaactcaaccgacagctca

SEQ ID NO: 4323 - DNA, 51 bp, Homo sapiens
agattcccgaataaccgggtctgaaytaatgagtttttactctgctttgaa

SEQ ID NO: 4324 - DNA, 51 bp, Homo sapiens
atgtaaagcacatatttgcttatggraccacactttctcctagcagccagt

SEQ ID NO: 4325 - DNA, 51 bp, Homo sapiens
ccaaggcaaggggacaagtgataaayaaggacaaataaggaacaaggtcaa

SEQ ID NO: 4326 - DNA, 51 bp, Homo sapiens
aaagacacaacacagatgagaagaasaactgagaggaaatgtaagcccagc

SEQ ID NO: 4327 - DNA, 51 bp, Homo sapiens
tgtcaaatgaatgagaaatcctgagycataagtgaagttttctcattaggt

SEQ ID NO: 4328 - DNA, 51 bp, Homo sapiens
tatgatcagctctgttaaatatggcrcttcaggtaaggtagggtagtcgat

SEQ ID NO: 4329 - DNA, 51 bp, Homo sapiens
gaacattaaaaaactcaagttcacargatttggatgtgaaggaaaggaaag

SEQ ID NO: 4330 - DNA, 51 bp, Homo sapiens
tccaaaagccttattaccagagacartatgtgttaagaccttggaaagaga

SEQ ID NO: 4331 - DNA, 51 bp, Homo sapiens
atttgtttttaaatattgctttgcasactcttctgtattgtggcaaatcca

SEQ ID NO: 4332 - DNA, 51 bp, Homo sapiens
tgggttaaaactagaataaggtccartgatatttttctctgaatctcttgc

SEQ ID NO: 4333 - DNA, 51 bp, Homo sapiens
aggataatccgtcatctatacaaagraaaacttaccccagtgaagtggtta

SEQ ID NO: 4334 - DNA, 51 bp, Homo sapiens
agttaccttctaatttaatttttcaycgatctcttcagatgaagttcttgt

SEQ ID NO: 4335 - DNA, 51 bp, Homo sapiens
gagcctccactaaaaagctcaaatamaattaattcatcccattatgactga

SEQ ID NO: 4336 - DNA, 51 bp, Homo sapiens
tataggaggtacaggtgttagataaratgctttatgaaatgttagttgtat

SEQ ID NO: 4337 - DNA, 51 bp, Homo sapiens
catcacacagaagttgtagcaatagycactaatcaaagttccttctattca

SEQ ID NO: 4338 - DNA, 51 bp, Homo sapiens
tgaagatacacgaggatgaagtagasgatatggaagaaaattaagtgtgat

SEQ ID NO: 4339 - DNA, 51 bp, Homo sapiens
gaagaactgaattgaggtcagggaarctataaacctttgagtgcttttgtg

SEQ ID NO: 4340 - DNA, 51 bp, Homo sapiens
gagaaagaaaaaatttccttgaaacraagtctaataaagtattgtgaaaac

SEQ ID NO: 4341 - DNA, 51 bp, Homo sapiens
ctgatctgttatttcctcaaccctaycaatgtttaaaaacattagaacctg

SEQ ID NO: 4342 - DNA, 51 bp, Homo sapiens
gtactatattaccataatcaactacygtaatgtatgctataggccaagcgc

SEQ ID NO: 4343 - DNA, 51 bp, Homo sapiens
atttattacccaatctcacctaaccrcctaatcactcctgggtcatcctgt

SEQ ID NO: 4344 - DNA, 51 bp, Homo sapiens
taggcaccatacccggcctatttcaygtaatctccgcgagcatcctacaag

SEQ ID NO: 4345 - DNA, 51 bp, Homo sapiens
ctcacacttcttgagctcttcactasgcaccatacccggcctatttcacgt

SEQ ID NO: 4346 - DNA, 51 bp, Homo sapiens
ttattttttataagacacattaaggragactgattttgtataaaaatgtcc

SEQ ID NO: 4347 - DNA, 51 bp, Homo sapiens
atccacataatttctttgctgaagcrccttttgaaatattttcttaaaaaa

SEQ ID NO: 4348 - DNA, 51 bp, Homo sapiens
gcttctgatgtgtttctttctgtccyacaagtactttctgaaccagcttcc

SEQ ID NO: 4349 - DNA, 51 bp, Homo sapiens
aacctttctttatagctcctatcaartcattctacataagaaacatcttat

SEQ ID NO: 4350 - DNA, 51 bp, Homo sapiens
aaaaccttagggacaggaagtagtayggttcaggaagaaccaaagtaattt

SEQ ID NO: 4351 - DNA, 51 bp, Homo sapiens
ctcttcaggtcggatcataagcctcrgaacgtgtcatacatcccataaact

SEQ ID NO: 4352 - DNA, 51 bp, Homo sapiens
gtacttaagacgcttgtcagctaaawgtcaagtggtctttcttccatgtcc

SEQ ID NO: 4353 - DNA, 51 bp, Homo sapiens
ggaattggtcagcattactgaatacygccaggaagtcagtgaggaaaagca

SEQ ID NO: 4354 - DNA, 51 bp, Homo sapiens
gcaaaggacaataaaatgagtataaratgagtatataaaatgcctgtatgt

SEQ ID NO: 4355 - DNA, 51 bp, Homo sapiens
gggtttgattttgcaaaaagatatcraagcagtaaggactccagtgggtaa

SEQ ID NO: 4356 - DNA, 51 bp, Homo sapiens
ctgcttctgaaatggtaaacttaagsagagcttggaaataggataatgagt

SEQ ID NO: 4357 - DNA, 51 bp, Homo sapiens
acatgttctattgcctcatgcagtastacattttagagcgcaagaatgttg

SEQ ID NO: 4358 - DNA, 51 bp, Homo sapiens
gtgctttctgatcatgatggatacaratgtcatcttcagattcttgtatct

SEQ ID NO: 4359 - DNA, 51 bp, Homo sapiens
agagggggtaggtctgatggtgcatkaaacagtcacaaatagcaattacag

SEQ ID NO: 4360 - DNA, 51 bp, Homo sapiens
agccagcacaaaatgaacctttatayagtgaagaccattaggattgagaca

SEQ ID NO: 4361 - DNA, 51 bp, Homo sapiens
gcttcttaagcaggtattcaatctayataaagaatgtgaaataattatttc

SEQ ID NO: 4362 - DNA, 51 bp, Homo sapiens
ggtatttcaaggggatgccctgatastaatgggagacaatctcagatgcat

SEQ ID NO: 4363 - DNA, 51 bp, Homo sapiens
gagggaccaagaatatcaaatcccasagagagaggaagggctgtgaaggtg

SEQ ID NO: 4364 - DNA, 51 bp, Homo sapiens
agtggagctgtcctaggcaacactcrcggtctcaggctgcggtgggcgtct

SEQ ID NO: 4365 - DNA, 51 bp, Homo sapiens
tgtctactagaaaatgacaaaatccrcatactaaagatcccttttgcttaa

SEQ ID NO: 4366 - DNA, 51 bp, Homo sapiens
taatatacataaatgcacatataaakttgccactagtttggagtattaaac

SEQ ID NO: 4367 - DNA, 51 bp, Homo sapiens
agccagggttaacagtggctcaaacmagagtattaacaattgacatgctga

SEQ ID NO: 4368 - DNA, 51 bp, Homo sapiens
attacaggcaagctcatcaaagaacyacattggctcataactgcccattca

SEQ ID NO: 4369 - DNA, 51 bp, Homo sapiens
catatgtaggttttacgatagtaggmaaatattggactgcccattttaaag

SEQ ID NO: 4370 - DNA, 51 bp, Homo sapiens
aaaagttccctggcagcagttctaawtgtcatggccctgaaaactcgttag

SEQ ID NO: 4371 - DNA, 51 bp, Homo sapiens
gttacattggtacaatcattttgaargacttaccaagagtttaatacagtc

SEQ ID NO: 4372 - DNA, 51 bp, Homo sapiens
tctgtacatagcttcttgtagagcastctatatacctaaaacatcgcatct

SEQ ID NO: 4373 - DNA, 51 bp, Homo sapiens
gcgtcatgttttgatggtgcttttayatgcaagggctatgtagggctttaa

SEQ ID NO: 4374 - DNA, 51 bp, Homo sapiens
attttaccactaaggcatggaattaygagattgaactgaagtgaactcaag

SEQ ID NO: 4375 - DNA, 51 bp, Homo sapiens
ctattttactacgccttttgagcatmactgttgacaaccagtggcattgga

SEQ ID NO: 4376 - DNA, 51 bp, Homo sapiens
gctgctcagatgccgggatgttcatmaacaggacaaaaggctgaaaagtgg

SEQ ID NO: 4377 - DNA, 51 bp, Homo sapiens
gcatgcaccttatttatgtgaaatgycaatcagtagtagcatattcagatc

SEQ ID NO: 4378 - DNA, 51 bp, Homo sapiens
ctgggaagggggaaatatctcacagyatgattttattacagggctttttgg

SEQ ID NO: 4379 - DNA, 51 bp, Homo sapiens
ttccccaatgttatacattatgtaartggcacagttgcatctaaaatatat

SEQ ID NO: 4380 - DNA, 51 bp, Homo sapiens
cacatgactatgggatactttattgmaaaacacagttctagtgtattattt

SEQ ID NO: 4381 - DNA, 51 bp, Homo sapiens
aaaattacctccttccctcttcggargcataactgttttgaagtctgtgtg

SEQ ID NO: 4382 - DNA, 51 bp, Homo sapiens
cagcaggcatttttataggcattcartaagtaattagaaataaaacacaat

SEQ ID NO: 4383 - DNA, 51 bp, Homo sapiens
gcaatgcctaactttgtcaaaataasgttgcaaaattcagaatgaaaaaga

SEQ ID NO: 4384 - DNA, 51 bp, Homo sapiens
gctagctcttactgctttttaagaasagtgaatctttgagtcactagaggt

SEQ ID NO: 4385 - DNA, 51 bp, Homo sapiens
caggattcccaacagtttaaacgcargccctttaatagaacctctagtgac

SEQ ID NO: 4386 - DNA, 51 bp, Homo sapiens
aagacattttgaatagaagactttargttattagaaatgtgggagagatca

SEQ ID NO: 4387 - DNA, 51 bp, Homo sapiens
ctaagacagctagagcctctgcagamctctcatgtgattctcaccaggact

SEQ ID NO: 4388 - DNA, 51 bp, Homo sapiens
ctcaaaatttggggagggctaataawgtaataatctatgtcttacatccta

SEQ ID NO: 4389 - DNA, 51 bp, Homo sapiens
tacctcctaagtataaacctctacayatacatagtcaacgaatttggatgc

SEQ ID NO: 4390 - DNA, 51 bp, Homo sapiens
ccccgttgttctcagcataaaggggwccaagtacttaaataaaaaattcat

SEQ ID NO: 4391 - DNA, 51 bp, Homo sapiens
cctcccaggaacatgaacatgaaacrcttgagtcccagtgggctgctccgc

SEQ ID NO: 4392 - DNA, 51 bp, Homo sapiens
caattacatggaggtaacttcatgaraagaataagatcagtcatactcaag

SEQ ID NO: 4393 - DNA, 51 bp, Homo sapiens
tcagttcttttcgaatgtatcatacygctctttctctataggagataagag

SEQ ID NO: 4394 - DNA, 51 bp, Homo sapiens
attccgatgatttaaaaagcatttaygtaacatggtgaaaccctgtctcta

SEQ ID NO: 4395 - DNA, 51 bp, Homo sapiens
gagtggcagtatagggtaatggttamgagcatggactttgaagtcaaacag

SEQ ID NO: 4396 - DNA, 51 bp, Homo sapiens
aagaaaaaagctttgctttttttcaktataggaaactggagaatgcccaga

SEQ ID NO: 4397 - DNA, 51 bp, Homo sapiens
aggccagtactagtttctctgttggwcaggtaaggaaatgcaaggttacag

SEQ ID NO: 4398 - DNA, 51 bp, Homo sapiens
tatggacaggttttacaactattgaracagttctaatcaactgtaggaatt

SEQ ID NO: 4399 - DNA, 51 bp, Homo sapiens
gggctcaagtcagctgtgattagaartgagctactgtggactaccgcatag

SEQ ID NO: 4400 - DNA, 51 bp, Homo sapiens
tgtgtttcctattcttgaagttccaygaaatataaagatacacctacatag

SEQ ID NO: 4401 - DNA, 51 bp, Homo sapiens
catagggtcccctttagacagttaaracggcagctgcaaaaatgaacagca

SEQ ID NO: 4402 - DNA, 51 bp, Homo sapiens
tgtgaggtttttttgcaaattagatratcagtaagtccctagcgccataga

SEQ ID NO: 4403 - DNA, 51 bp, Homo sapiens
cccagatgtccatcataaaacgtacraaacagcttggaaataggtactgtg

SEQ ID NO: 4404 - DNA, 51 bp, Homo sapiens
gacagctcctctacaaatacgtaacrcagccagataggacatatcatttat

SEQ ID NO: 4405 - DNA, 51 bp, Homo sapiens
ggtgacttgtgatgcttatacagtcrctagaacttaggcctgtgcagtgaa

SEQ ID NO: 4406 - DNA, 51 bp, Homo sapiens
tcaatgttatcatcgttgaaacaaamactcaggtcatgtggctggagagta

SEQ ID NO: 4407 - DNA, 51 bp, Homo sapiens
tatacttacttattacttatcatcawccattatattttccaatttttcatc

SEQ ID NO: 4408 - DNA, 51 bp, Homo sapiens
acactgtagaggcctgagtttcatayggaaagggctgtgtttgaggcatag

SEQ ID NO: 4409 - DNA, 51 bp, Homo sapiens
acaggtgacttttgatgcctttggcyaactaggcactcacattccctctcc

SEQ ID NO: 4410 - DNA, 51 bp, Homo sapiens
ccttgatttcttttcctgtcatgccrccttgctccctggctattagttgag

SEQ ID NO: 4411 - DNA, 51 bp, Homo sapiens
aaacagcctttgcaaaattatgacartaggagaaacctgacatagttgact

SEQ ID NO: 4412 - DNA, 51 bp, Homo sapiens
gagcttcaacagcttattttttaaastggtgatgagtgaagagtactggtt

SEQ ID NO: 4413 - DNA, 51 bp, Homo sapiens
ttcctccttttgatatctacattggraaaaatataatatacttagtgagta

SEQ ID NO: 4414 - DNA, 51 bp, Homo sapiens
agccttcaagtggttacagattcaargggtatgttgttttttaaaggcacg

SEQ ID NO: 4415 - DNA, 51 bp, Homo sapiens
agcagaatggattgtggttattgtarcagttatccatttagctactaatat

SEQ ID NO: 4416 - DNA, 51 bp, Homo sapiens
gtgatttaaaaccacaaacaaaagcwattgcatattatgggagataaaaaa

SEQ ID NO: 4417 - DNA, 51 bp, Homo sapiens
catatcactggccagtccatttggtyaactcctcatttattctttgggtac

SEQ ID NO: 4418 - DNA, 51 bp, Homo sapiens
aggtttacttgtcattatctttacaracgtgggttcagtaaatgtgtgact

SEQ ID NO: 4419 - DNA, 51 bp, Homo sapiens
tgttgtgcaatgctcttggccctgarattcaattagattgctttgaacgat

SEQ ID NO: 4420 - DNA, 51 bp, Homo sapiens
aatttttaaaaaacaggtctatgtayaggatcttgaactcaagtacatggc

SEQ ID NO: 4421 - DNA, 51 bp, Homo sapiens
agcttctctagatatgcctagtcaayagcagttaaataataacaacaataa

SEQ ID NO: 4422 - DNA, 51 bp, Homo sapiens
gttttcaaaaagaaaaaccatgtagrctttgaaccaggaaaaaaaaaaact

SEQ ID NO: 4423 - DNA, 51 bp, Homo sapiens
cagatttataaaaggtattcaaaggscacataatgtttggttgagttaggt

SEQ ID NO: 4424 - DNA, 51 bp, Homo sapiens
aaagaaatattgggagagtaagggayagtcagcacacgaacagaacagtgt

SEQ ID NO: 4425 - DNA, 51 bp, Homo sapiens
cttgttgctccaaaggatgctgtgaratattatatctagtcaagtagccat

SEQ ID NO: 4426 - DNA, 51 bp, Homo sapiens
gtccagagacagtggacagcgcactsaagaaggtaagactagatcaactct

SEQ ID NO: 4427 - DNA, 51 bp, Homo sapiens
aaaaatgcatattcaggctgagtttwaaaagggaccgtaaatcactaggtg

SEQ ID NO: 4428 - DNA, 51 bp, Homo sapiens
aggtaaaatagagaaaaagcaatagraagtaaaccaaaaggaagaagtaag

SEQ ID NO: 4429 - DNA, 51 bp, Homo sapiens
cctgcacaactatgggcctgtaatamccttgattggtttggtagatttatc

SEQ ID NO: 4430 - DNA, 51 bp, Homo sapiens
ggggatcagatcttgggactaaaaamctatgaaacaaggaccatgggaaag

SEQ ID NO: 4431 - DNA, 51 bp, Homo sapiens
ggtgggggagacgttgattcctacayggtgtcggcattcaggcacagtcaa

SEQ ID NO: 4432 - DNA, 51 bp, Homo sapiens
ttcattaactctcccagaagaacaaygaagtcactgagaagatgtttcata

SEQ ID NO: 4433 - DNA, 51 bp, Homo sapiens
accatgttggatttctgaaaatttckcataaagaggtctctcaatagttct

SEQ ID NO: 4434 - DNA, 51 bp, Homo sapiens
tttgaaagagcatagcttttacacaytagcttaccaggacatagttaaaac

SEQ ID NO: 4435 - DNA, 51 bp, Homo sapiens
caaaaataccaactccaggaaataaygtgaactctaaatttgacttaaatg

SEQ ID NO: 4436 - DNA, 51 bp, Homo sapiens
atgccgataattaggctgccatggartaactgtatgttggccatattttct

SEQ ID NO: 4437 - DNA, 51 bp, Homo sapiens
atcatttactttctgtatggtcttgratatctatgatgctattacatgaaa

SEQ ID NO: 4438 - DNA, 51 bp, Homo sapiens
ggagaaaatatatactacacaggtamccttgttttacagctgaagcaaagt

SEQ ID NO: 4439 - DNA, 51 bp, Homo sapiens
aggcaatgatcttccttttgggcatraatactcattatcttcatgaattct

SEQ ID NO: 4440 - DNA, 51 bp, Homo sapiens
acagaaaaggtcacaggacaaacacygaaaagaatagagtagggacgttaa

SEQ ID NO: 4441 - DNA, 51 bp, Homo sapiens
ctgaatctaaaataactttcacataygttggtggttcaaaatctgaagaca

SEQ ID NO: 4442 - DNA, 51 bp, Homo sapiens
acttgtctaacattactccacacaamtaagaatggtcaaacggaaaatgat

SEQ ID NO: 4443 - DNA, 51 bp, Homo sapiens
agctcctttattcacttgaagtaatmaaaatagttaaatcaacaatacaat

SEQ ID NO: 4444 - DNA, 51 bp, Homo sapiens
tatacactaacaatgtccaactcgaraaggaaattaagaaaacaataccat

SEQ ID NO: 4445 - DNA, 51 bp, Homo sapiens
taaagtgaattgaaacctcataccayatatctcataatggattccagaact

SEQ ID NO: 4446 - DNA, 51 bp, Homo sapiens
ctgtattctaaggattttaatgaaaygaaggcacattaaaatcataatcca

SEQ ID NO: 4447 - DNA, 51 bp, Homo sapiens
agatgtgtaacttgaataagttacaytacacagttgaattgccaactcata

SEQ ID NO: 4448 - DNA, 51 bp, Homo sapiens
tccccttcaggctgtgatatctgaamtatgtttattcttgagtaattgtct

SEQ ID NO: 4449 - DNA, 51 bp, Homo sapiens
atctatttacaagactctaacttaayattagcagattgcagactctataat

SEQ ID NO: 4450 - DNA, 51 bp, Homo sapiens
gaaaacaactaatgtttgctttgctstctctgcctttaacatagatcagga

SEQ ID NO: 4451 - DNA, 51 bp, Homo sapiens
caaattaaatgcaaagtatcagtatragctctaaatttctttatacatgtg

SEQ ID NO: 4452 - DNA, 51 bp, Homo sapiens
tgattatagaaaataaattcattcastcatctaggataatggtccagaaaa

SEQ ID NO: 4453 - DNA, 51 bp, Homo sapiens
taagttgaaaagttgtggccaaaagraaaaactcctaattatttaagtgtg

SEQ ID NO: 4454 - DNA, 51 bp, Homo sapiens
gtgactgatcttatatctgatctcakccagtgtttaattccttttaaaaca

SEQ ID NO: 4455 - DNA, 51 bp, Homo sapiens
ccataattctcgatggcattttagckcctctgttattgtctatactaaagg

SEQ ID NO: 4456 - DNA, 51 bp, Homo sapiens
aagggcacaaggaaacttggaatgaygaaaatgttggtatcttaatagtgg

SEQ ID NO: 4457 - DNA, 51 bp, Homo sapiens
acccccaactggcactagactttgaraggatatttctttaagcctggatta

SEQ ID NO: 4458 - DNA, 51 bp, Homo sapiens
aattatctttagtctgttagcctcartatgtgtatatgtacctttacagca

SEQ ID NO: 4459 - DNA, 51 bp, Homo sapiens
tgggctgtgagagttaaaaaacttayagttggctttgtggtgacttttaga

SEQ ID NO: 4460 - DNA, 51 bp, Homo sapiens
gggacaggttggagggtccagccatktcatcgaatcgtctttgtgggcgat

SEQ ID NO: 4461 - DNA, 51 bp, Homo sapiens
ctgatgccaaatatttgcgataatakgtttaataaatgtttattgaacttt

SEQ ID NO: 4462 - DNA, 51 bp, Homo sapiens
ttctaactgaatttttattagtgcawaatatttgtatatatttatggggta

SEQ ID NO: 4463 - DNA, 51 bp, Homo sapiens
gaaggggaaaaaggagacagctatgraccatttcttaaaacctgacttcaa

SEQ ID NO: 4464 - DNA, 51 bp, Homo sapiens
tccccctatttattttgtgattagcratttagttttggcaaattatgcaat

SEQ ID NO: 4465 - DNA, 51 bp, Homo sapiens
gaatattctgtgtactaacaggattyaagggatggaagaacaaagcagaag

SEQ ID NO: 4466 - DNA, 51 bp, Homo sapiens
aggttttatgaagttcttctatggcyggcatgactcagcaagaaagagtcc

SEQ ID NO: 4467 - DNA, 51 bp, Homo sapiens
tggggccacactctggtgttacctamatttcttgaggctctccttggagga

SEQ ID NO: 4468 - DNA, 51 bp, Homo sapiens
ccttattggtgagggaggaagttggkatctatctattctaactggtttatt

SEQ ID NO: 4469 - DNA, 51 bp, Homo sapiens
cactcatttctttagagtattttaaytgaagtatatattacatgatattat

SEQ ID NO: 4470 - DNA, 51 bp, Homo sapiens
tgagacaggcataggactgacattcrcattctaaaggaaaaaaaaaaaaat

SEQ ID NO: 4471 - DNA, 51 bp, Homo sapiens
tgcagaactttatcttttatgtcaaygtccatcagtaaagatctaatgtac

SEQ ID NO: 4472 - DNA, 51 bp, Homo sapiens
atgagaaaatgaatatcttttataaytgagaaccagacttcttagaactct

SEQ ID NO: 4473 - DNA, 51 bp, Homo sapiens
ttaaataacaggtctggaaggaaacrgaagatatctgtgaaaaacaattca

SEQ ID NO: 4474 - DNA, 51 bp, Homo sapiens
aaactctaagttgttgaaattatcawtgaggttagaatcaaggtacttagc

SEQ ID NO: 4475 - DNA, 51 bp, Homo sapiens
gcacagtacatgacgctgagcataamggcgggaaagagatcacagttcctt

SEQ ID NO: 4476 - DNA, 51 bp, Homo sapiens
taatcatcaatgcccaacacaggaamgagtgtaagtaaatgaaacctctgt

SEQ ID NO: 4477 - DNA, 51 bp, Homo sapiens
ggagattggcattgaacccaagacawccttaatttctcaatatctctataa

SEQ ID NO: 4478 - DNA, 51 bp, Homo sapiens
taccatgactgcatttgtcaaggaakaaatgggttaatgttaggaagccag

SEQ ID NO: 4479 - DNA, 51 bp, Homo sapiens
tgcatcactcatattaaatggctacygaacaagagggcttggaggcaaagt

SEQ ID NO: 4480 - DNA, 51 bp, Homo sapiens
ttacaaccagttggccataaatccartccaagaaaaatactgagggaagga

SEQ ID NO: 4481 - DNA, 51 bp, Homo sapiens
caaagagtgtcttctgagtgtcctamaccacttaattagcaaagtgtcatt

SEQ ID NO: 4482 - DNA, 51 bp, Homo sapiens
ccttctccgttcttcattcctacacyctaaacttatatacctttggtggat

SEQ ID NO: 4483 - DNA, 51 bp, Homo sapiens
tttagagtttcctcaaagagcatacratacttccatcatattgttcttgga

SEQ ID NO: 4484 - DNA, 51 bp, Homo sapiens
aacagaattttgcataaatagcagaycttagtcactgaataccccattaaa

SEQ ID NO: 4485 - DNA, 51 bp, Homo sapiens
gttgaagttgttttctttaactaacyataagacttgaagccagttagaaca

SEQ ID NO: 4486 - DNA, 51 bp, Homo sapiens
aaatagcaagtcagagaatcaaaagrccaatacattgattaattcctatga

SEQ ID NO: 4487 - DNA, 51 bp, Homo sapiens
tttatttagacataatgcaatctcayacttactagactatactatagtgca

SEQ ID NO: 4488 - DNA, 51 bp, Homo sapiens
aaaaggaaaataaacattatagttawgttacaggtaaagaaacaaggtaaa

SEQ ID NO: 4489 - DNA, 51 bp, Homo sapiens
tttcactaatgcatgagagctacaaragagccgaactctacatgggtgaga

SEQ ID NO: 4490 - DNA, 51 bp, Homo sapiens
gtcagctctaggcaagagccatagasagaaaagaattttgagaaagttgaa

SEQ ID NO: 4491 - DNA, 51 bp, Homo sapiens
tttgtagaactgatgatatatgactkagagatacagtctcagctacaactg

SEQ ID NO: 4492 - DNA, 51 bp, Homo sapiens
gtgcggccccactacctaaccacctraagatttgaaattggtgtctttaac

SEQ ID NO: 4493 - DNA, 51 bp, Homo sapiens
agctcaacgatgtatctcacttttargtatgcgcatatatgactcgtggga

SEQ ID NO: 4494 - DNA, 51 bp, Homo sapiens
taattgcagcagttcaggctagagayggtgatattggtggaggtacaacgt

SEQ ID NO: 4495 - DNA, 51 bp, Homo sapiens
gttgaactttcaataagggagataasatgtctacatataataaaaacaagc

SEQ ID NO: 4496 - DNA, 51 bp, Homo sapiens
ttactttggtcttttggctcccagaygttttgcttttttcagtccctggtc

SEQ ID NO: 4497 - DNA, 51 bp, Homo sapiens
ttggataattcacaggccgatggtcrctcagcaagtgaggaatggatgcat

SEQ ID NO: 4498 - DNA, 51 bp, Homo sapiens
ttctatggcataattgatgttaaaayaaggagattacctaggtgggctgac

SEQ ID NO: 4499 - DNA, 51 bp, Homo sapiens
tgaagatactttcaagcagtttaaamaatgatactttgcgaagaaacccca

SEQ ID NO: 4500 - DNA, 51 bp, Homo sapiens
gatttatttatttatcaaacccttayatagtacttgctatgtgtaatgata

SEQ ID NO: 4501 - DNA, 51 bp, Homo sapiens
gtcaggcatgggttagtgacacaaaycacttggtaattaaaaaccccttgg

SEQ ID NO: 4502 - DNA, 51 bp, Homo sapiens
ctgagcaatggacatagctctcataygaaccttttcagctaacaccggata

SEQ ID NO: 4503 - DNA, 51 bp, Homo sapiens
ccacaacccagataccaaaaggtgargggaaatatctctgagacctcaggg

SEQ ID NO: 4504 - DNA, 51 bp, Homo sapiens
caggttggccaccttgcaggatgtarccctttataagaaaaaagtctcctt

SEQ ID NO: 4505 - DNA, 51 bp, Homo sapiens
gaatgaggagcaaagagtaagaaacrgaatgagctgtgtacaaatatgtac

SEQ ID NO: 4506 - DNA, 51 bp, Homo sapiens
tttgtcacactgctcaagagcttccraatgggatcagtcagacttatttgc

SEQ ID NO: 4507 - DNA, 51 bp, Homo sapiens
gaatttaaagggagacctgtcagtayggatgaatgtcttcttctagctcct

SEQ ID NO: 4508 - DNA, 51 bp, Homo sapiens
cccaagatttcctcactccatagtaragtagttttaaattttcagtagtga

SEQ ID NO: 4509 - DNA, 51 bp, Homo sapiens
agatccagcctatctgtgcttcttcrgaaactctcttagaaatagcttctt

SEQ ID NO: 4510 - DNA, 51 bp, Homo sapiens
acctgaaataagcaagaataagatargtaaagacagactgttcaaaatgca

SEQ ID NO: 4511 - DNA, 51 bp, Homo sapiens
aaaaacatctctttctggtgatgtamgaactggccagatgtcactggactg

SEQ ID NO: 4512 - DNA, 51 bp, Homo sapiens
gggtgaggaactgactagggataaakaagtgaaattgatcaggaaagggta

SEQ ID NO: 4513 - DNA, 51 bp, Homo sapiens
aatcaagttttgaactaagagctacrgaatgtatgccatttctctctgggg

SEQ ID NO: 4514 - DNA, 51 bp, Homo sapiens
gcagaaagggaaaactcacacaaaaytactgcttcatcaactgtagcttta

SEQ ID NO: 4515 - DNA, 51 bp, Homo sapiens
gatgaagcacaattcatataagtgaycaggtaatggtgccaacaatatcaa

SEQ ID NO: 4516 - DNA, 51 bp, Homo sapiens
gtccccgaatatggcattagtacccratacccggctgagctcagacttcca

SEQ ID NO: 4517 - DNA, 51 bp, Homo sapiens
aggatttcctctccaatgtataaaaygttggattccaagcatcttaaacag

SEQ ID NO: 4518 - DNA, 51 bp, Homo sapiens
agttgatactacacatttttgagtcyaataaaagagagaaactagaaagcc

SEQ ID NO: 4519 - DNA, 51 bp, Homo sapiens
ggaaatcctgttttctagcaagcaastcagcaggtacaaatcaggagacca

SEQ ID NO: 4520 - DNA, 51 bp, Homo sapiens
ttgggccttgaagttcatttagttasagatggtaaaagcatggcacacata

SEQ ID NO: 4521 - DNA, 51 bp, Homo sapiens
ggctggactgcagcagaacacagtcratgaaaaaaagaatctcaatcattg

SEQ ID NO: 4522 - DNA, 51 bp, Homo sapiens
tcattaatgttttacatcatttacartctagtcatcaatttgttcagtgtt

SEQ ID NO: 4523 - DNA, 51 bp, Homo sapiens
tacatggttttcattttaacctacamtatatgtctggctatagcagtttta

SEQ ID NO: 4524 - DNA, 51 bp, Homo sapiens
atatcttaaaagtttctagtagtatraagttcccaggccaggcgcagtggc

SEQ ID NO: 4525 - DNA, 51 bp, Homo sapiens
atgtttgtaataacttcaacctagasagctaacttctaaaaagtagaccat

SEQ ID NO: 4526 - DNA, 51 bp, Homo sapiens
tgatcatttacctcctaaatttttaygtccaagctgttctttagatatcta

SEQ ID NO: 4527 - DNA, 51 bp, Homo sapiens
tctctggggaaggcagttctggatasatttcctttgcctcctcagaagcca

SEQ ID NO: 4528 - DNA, 51 bp, Homo sapiens
ggtgaagcactgggacccttggaaargaaataaatcgtgtttatgcccttg

SEQ ID NO: 4529 - DNA, 51 bp, Homo sapiens
tatatgcaaacatatttatcagggayccatcaaagttcagcttcagctaca

SEQ ID NO: 4530 - DNA, 51 bp, Homo sapiens
tctggtgttccctgcctcgtttaccrctctttccccatactttggtctgac

SEQ ID NO: 4531 - DNA, 51 bp, Homo sapiens
acacaacttttctgccctttgtggamatgtagtattatttctgaatgttaa

SEQ ID NO: 4532 - DNA, 51 bp, Homo sapiens
ctagggaggccatgaatacagaaaamagtgttgcataaatgtagagggtta

SEQ ID NO: 4533 - DNA, 51 bp, Homo sapiens
cctcccagaagtgttagctaattgaraagtattcagggccaccacactata

SEQ ID NO: 4534 - DNA, 51 bp, Homo sapiens
tgccttattttatttctatagttaayaggttaatcctaaaattctgtagga

SEQ ID NO: 4535 - DNA, 51 bp, Homo sapiens
gcatttataacatactttgctgcaaytaattttttccagccttctaggaca

SEQ ID NO: 4536 - DNA, 51 bp, Homo sapiens
tgtttgttgtgcctatgcttgttagratgaaattatctactgcgtctttcc

SEQ ID NO: 4537 - DNA, 51 bp, Homo sapiens
aaggagaaatggatgggttttgctartacaatgacctcaaaaggcggtgtg

SEQ ID NO: 4538 - DNA, 51 bp, Homo sapiens
tgtgcttccactgcagactggatagmaaccctaactctgcaataccactac

SEQ ID NO: 4539 - DNA, 51 bp, Homo sapiens
aaatgtatattgaaatgcaaagaaastagaatagcaaaaatgttttgaaaa

SEQ ID NO: 4540 - DNA, 51 bp, Homo sapiens
tcgggacacattgtgttctcagatcrcattcggaaaggcaaaaagtgtgaa

SEQ ID NO: 4541 - DNA, 51 bp, Homo sapiens
cgcagggcggagtgtggaccagatarcggtaagaatggatgtgggacagca

SEQ ID NO: 4542 - DNA, 51 bp, Homo sapiens
atttgtatatccagttgtttcagaarggcatataaaaggtactcatacccc

SEQ ID NO: 4543 - DNA, 51 bp, Homo sapiens
tttttccagagttgctcagcacctamgaagagtttctaaactgtttccaac

SEQ ID NO: 4544 - DNA, 51 bp, Homo sapiens
agagtggtcaatagttggatttgacrctttcctggatcccaaccccactcc

SEQ ID NO: 4545 - DNA, 51 bp, Homo sapiens
gttgagaaatgattgatgctgaagargtggtattctattggtaaggcttat

SEQ ID NO: 4546 - DNA, 51 bp, Homo sapiens
ttacatttcttagaagcttccccaawtgcatagttatcagggaaacctgaa

SEQ ID NO: 4547 - DNA, 51 bp, Homo sapiens
atggtgctggtccttcaagtttatayctctgggatcattggtttccaaaca

SEQ ID NO: 4548 - DNA, 51 bp, Homo sapiens
ttgagaatgtaccctgtcctccctayatacacgggcacaatttccctgtag

SEQ ID NO: 4549 - DNA, 51 bp, Homo sapiens
aatgaaaatcccagaggtatgcaggyttcaggcacagtttgatccagtagt

SEQ ID NO: 4550 - DNA, 51 bp, Homo sapiens
agaaaatccctatggtaaaatgctaygcggccaatgaatgtgaatacaaag

SEQ ID NO: 4551 - DNA, 51 bp, Homo sapiens
aaggtttgcgacattccagtatttcrctatatatgaagttctttatgaagc

SEQ ID NO: 4552 - DNA, 51 bp, Homo sapiens
gactgctctctagcaatgtgactccragctagttccctcatctcctgggac

SEQ ID NO: 4553 - DNA, 51 bp, Homo sapiens
gagttaagcactattctgacttttawcacgatgggttagttttccctgttc

SEQ ID NO: 4554 - DNA, 51 bp, Homo sapiens
gttccaaacacaattgtaagttttcyaataatcaagtatccatttttaaat

SEQ ID NO: 4555 - DNA, 51 bp, Homo sapiens
ggaccaaacaagaaggcaatagggamtataactacattctaaatgagaaat

SEQ ID NO: 4556 - DNA, 51 bp, Homo sapiens
ccttggtgagggaaattcttaaacarcacaaaaatcattaggaaaagatca

SEQ ID NO: 4557 - DNA, 51 bp, Homo sapiens
ggaaaggatctgctcacattttttcygacctcaaaccttagacatttcaca

SEQ ID NO: 4558 - DNA, 51 bp, Homo sapiens
ctacatgtggacctccgtgagaaaasgcatatgcataggacggtgagcagt

SEQ ID NO: 4559 - DNA, 51 bp, Homo sapiens
aatgaatgagtgttgtgatcaaatartcctcacgtatagggtgtgccaagg

SEQ ID NO: 4560 - DNA, 51 bp, Homo sapiens
caaaaagccccagatcactcacttayatgacagaaacattagtctctgcct

SEQ ID NO: 4561 - DNA, 51 bp, Homo sapiens
ctagtcacttgcaggattttaaaagwatgagactctcaagaattagtataa

SEQ ID NO: 4562 - DNA, 51 bp, Homo sapiens
agaatgtacatcatccgagaacaaamtagagcgaagggctgatccactgga

SEQ ID NO: 4563 - DNA, 51 bp, Homo sapiens
gtcagcaaaataaacactggcccatragcccattgaaaaggagtaaaggag

SEQ ID NO: 4564 - DNA, 51 bp, Homo sapiens
tttgcaagtataactgtttctgtaamtgtctgcacaatgaatcatgtttcc

SEQ ID NO: 4565 - DNA, 51 bp, Homo sapiens
ggatgggacctggaagaatcagagargacctcgtggagttactgaaactta

SEQ ID NO: 4566 - DNA, 51 bp, Homo sapiens
taatggaagctcagggaaacaattaratcctgttataagaaaataaaaata

SEQ ID NO: 4567 - DNA, 51 bp, Homo sapiens
tgcattcagctgcagagcaggtcccratgtctaccacgtgtgtccagggtg

SEQ ID NO: 4568 - DNA, 51 bp, Homo sapiens
tttgctgctgtagacatttacgtagwcgtttttgtgtgaacatgtttttgt

SEQ ID NO: 4569 - DNA, 51 bp, Homo sapiens
aattataatatagtcctcagtcttamagtgattagagcttactgaccagca

SEQ ID NO: 4570 - DNA, 51 bp, Homo sapiens
attgcatggactcctcattataagcygagtgctacagtaaaactgtggaac

SEQ ID NO: 4571 - DNA, 51 bp, Homo sapiens
tcatataagctatgacaggaagagartcaatgcttgatgtttataatatat

SEQ ID NO: 4572 - DNA, 51 bp, Homo sapiens
taaaaaactgctgccatttttattayctattcatggcactagggtgaagct

SEQ ID NO: 4573 - DNA, 51 bp, Homo sapiens
tgcagcagaggtggagagggaattasatacctgaatttacaaatggatggt

SEQ ID NO: 4574 - DNA, 51 bp, Homo sapiens
gcatgatgtacatagaataagaagaygtaaaaatatttcttttgtctatga

SEQ ID NO: 4575 - DNA, 51 bp, Homo sapiens
ctctcatttatgaagaatgactttgsagcgtaccatatccttagctggtaa

SEQ ID NO: 4576 - DNA, 51 bp, Homo sapiens
caacaatacaccagatcaagcaaatkaaagaatttcagaactagaaaaccg

SEQ ID NO: 4577 - DNA, 51 bp, Homo sapiens
caaagatatcctatttaagaaacagraaacacttacattgcacattatcaa

SEQ ID NO: 4578 - DNA, 51 bp, Homo sapiens
ctttccccccaaaataaaatagcctraaccttatatgttcttcatgtggcg

SEQ ID NO: 4579 - DNA, 51 bp, Homo sapiens
aatctttggttatctcaaaacaaaasaaaatgtcctgttattgtcatccat

SEQ ID NO: 4580 - DNA, 51 bp, Homo sapiens
taaagaatatatggattaaatcagayagtatgtgtgaaaacacttaacggt

SEQ ID NO: 4581 - DNA, 51 bp, Homo sapiens
atcatggcatactcttttctccttcyaatcaattctccagagcaagaatta

SEQ ID NO: 4582 - DNA, 51 bp, Homo sapiens
agggatagttttgtatttgagcataygtggaactcatcctccttgtgtgtc

SEQ ID NO: 4583 - DNA, 51 bp, Homo sapiens
gaattattccaattgtactcatgaaycataagacaaaaaagagccatgtaa

SEQ ID NO: 4584 - DNA, 51 bp, Homo sapiens
taaactgcatatgatcagcatgaaawaagtatagaatgtgaaagtacattt

SEQ ID NO: 4585 - DNA, 51 bp, Homo sapiens
tccttctacttagtatccttaggtaycaatttctgcctgctcgctagctta

SEQ ID NO: 4586 - DNA, 51 bp, Homo sapiens
ttagcagagaattctgctagaaatayggaaagctctgactcggtgttaaat

SEQ ID NO: 4587 - DNA, 51 bp, Homo sapiens
acacaacatataatttctactgtgayatgaagtacataaggctctatgtat

SEQ ID NO: 4588 - DNA, 51 bp, Homo sapiens
agtgggctcagctgggttgctgtacyacccatatcatgtgcaattgctaaa

SEQ ID NO: 4589 - DNA, 51 bp, Homo sapiens
gtttggtttaaaagtggagagaatgyattaagattaggtgaaggttattat

SEQ ID NO: 4590 - DNA, 51 bp, Homo sapiens
gccctccgctatgcctttccctactsactgttcagagttctagctaaccct

SEQ ID NO: 4591 - DNA, 51 bp, Homo sapiens
gaaaaggataacagaagggcaaagcratgaaaagtaaatataaatggaaaa

SEQ ID NO: 4592 - DNA, 51 bp, Homo sapiens
attaaaaatatctgcaaagcaattaygagaaacagtcattttcaccacatc

SEQ ID NO: 4593 - DNA, 51 bp, Homo sapiens
cacttgcccagattacaaccaggaamttcacttggggtctctgtctgttaa

SEQ ID NO: 4594 - DNA, 51 bp, Homo sapiens
aaactaatgaggccggtagatttggracatcaaagttgttaagttaggcca

SEQ ID NO: 4595 - DNA, 51 bp, Homo sapiens
tatcctggtacattctgtccaacatsagaacctatgattcctccttgaaat

SEQ ID NO: 4596 - DNA, 51 bp, Homo sapiens
ataaacttttttattctaagggaagycagtgattaaaaagcggtttatggg

SEQ ID NO: 4597 - DNA, 51 bp, Homo sapiens
catgctggtcacaatcacaattgtcycaggttagaatttctttcagaagtt

SEQ ID NO: 4598 - DNA, 51 bp, Homo sapiens
ccgaaaatccggattgttctacctcwaagaccgatctgctcagatcttctt

SEQ ID NO: 4599 - DNA, 51 bp, Homo sapiens
ctatgaacaaggagctgttcactgasatataggattgctcagagctgccct

SEQ ID NO: 4600 - DNA, 51 bp, Homo sapiens
aatgagagtttaggatttctgacaaytcatagatataaaataggaattctc

SEQ ID NO: 4601 - DNA, 51 bp, Homo sapiens
taaatatttctgaatgattacagatyaagtttattttcaaacctctgttca

SEQ ID NO: 4602 - DNA, 51 bp, Homo sapiens
tccaaagaaatcagcagtttaatcaytgacaactcgttttaagaaagagga

SEQ ID NO: 4603 - DNA, 51 bp, Homo sapiens
acaataatcactttattaagttaaakacaagatgaaataaaagattacttc

SEQ ID NO: 4604 - DNA, 51 bp, Homo sapiens
taatagctgtcactagaaagctaaamaaagtcaccattcatcttactcata

SEQ ID NO: 4605 - DNA, 51 bp, Homo sapiens
aaaactaagatacagctgaatgaatsatagcacttattttttaaataatgg

SEQ ID NO: 4606 - DNA, 51 bp, Homo sapiens
tttagtaagctgggaattgaagataygacttaggtaagtgcatttttatat

SEQ ID NO: 4607 - DNA, 51 bp, Homo sapiens
agagaatggatctaaaacatggtccrgaagattgtgaagagcggagactcg

SEQ ID NO: 4608 - DNA, 51 bp, Homo sapiens
agtgccctccccgctgatttgtagastatctaatagaactagtgcactaga

SEQ ID NO: 4609 - DNA, 51 bp, Homo sapiens
atgacagaagataagttaggaagaaraatggctctacaacaaggtaaattg

SEQ ID NO: 4610 - DNA, 51 bp, Homo sapiens
ggagtcaaagttaaaagagaaaaaawctgtatccagctgggacaaccagag

SEQ ID NO: 4611 - DNA, 51 bp, Homo sapiens
aaaaggtgctcaatggttgctattayacaaaggaagagaaatacgctcaaa

SEQ ID NO: 4612 - DNA, 51 bp, Homo sapiens
attttctggacatgactgtgataacsggggtgttgatgaaatattatgaga

SEQ ID NO: 4613 - DNA, 51 bp, Homo sapiens
gtttatgtactgtcatttacttggarattatcactttgcgtatttcagatg

SEQ ID NO: 4614 - DNA, 51 bp, Homo sapiens
gttccctcctattcaatgtctattayaaaaaatgcagcattggataatgaa

SEQ ID NO: 4615 - DNA, 51 bp, Homo sapiens
gatacatgttaaaggctattgccaaygtttccagagctttcaacccatcca

SEQ ID NO: 4616 - DNA, 51 bp, Homo sapiens
taacatatttagttgtttccttccamaagagaaatgaaaacatgtcaacta

SEQ ID NO: 4617 - DNA, 51 bp, Homo sapiens
acttcagttttcaattatattaagcwgaattttaaaagaaaggggaaaagt

SEQ ID NO: 4618 - DNA, 51 bp, Homo sapiens
gcatccttttaagcagaccacaaccyggaatttatcactcatgatcttccc

SEQ ID NO: 4619 - DNA, 51 bp, Homo sapiens
tggtaggaatcacatgaataaccaartatcacataaaagcctttataagat

SEQ ID NO: 4620 - DNA, 51 bp, Homo sapiens
attacagtagcagtgactaaaataaygaagtaggaaacttgctccaaacct

SEQ ID NO: 4621 - DNA, 51 bp, Homo sapiens
caaaaataccatataaaactttgaarggtaatgagaatgtggcaaaaaaaa

SEQ ID NO: 4622 - DNA, 51 bp, Homo sapiens
tgcttgctactgaggctactaaggcratcttatatctttagtagtctgctg

SEQ ID NO: 4623 - DNA, 51 bp, Homo sapiens
tcgagttttataccatttttgcttgyaagtataatctcctcaacctatttg

SEQ ID NO: 4624 - DNA, 51 bp, Homo sapiens
atgtaatttcaaccttcagagaaagrcattcttcctatcttacagataagg

SEQ ID NO: 4625 - DNA, 51 bp, Homo sapiens
gagaacagagtgattattattcaacygagttagggctaagggtctttggac

SEQ ID NO: 4626 - DNA, 51 bp, Homo sapiens
cattggaagaagaattgtctcaggcygcatataaaatacaccaacgatagc

SEQ ID NO: 4627 - DNA, 51 bp, Homo sapiens
agtggtttgatatgtcatcatatcaygtaaggctgaagagattttgtatag

SEQ ID NO: 4628 - DNA, 51 bp, Homo sapiens
atgtcactacattctaactggaaacsatgtgatcccgacatttgctgctgt

SEQ ID NO: 4629 - DNA, 51 bp, Homo sapiens
accttatttgtgcttaatccccacartaaagagcaaaaggaaaatatcttg

SEQ ID NO: 4630 - DNA, 51 bp, Homo sapiens
aaaggaccctttatttttatcactcraattatcttgctccctttttgcctg

SEQ ID NO: 4631 - DNA, 51 bp, Homo sapiens
gatgtatccatgactagatgttcagygtatttgggagagaacccaaggggg

SEQ ID NO: 4632 - DNA, 51 bp, Homo sapiens
ctaccttctccaaagggcttctttawgttatgtaaatagagactgtttttt

SEQ ID NO: 4633 - DNA, 51 bp, Homo sapiens
agaaatcaatgcaatgaagaccaacraagtgatagaaaatgggcgaagtac

SEQ ID NO: 4634 - DNA, 51 bp, Homo sapiens
ctgttaaacatatggaaagatacacrcactaatgggaaaaaagaaagaatg

SEQ ID NO: 4635 - DNA, 51 bp, Homo sapiens
ctttaccaaaagtttgaaagtttaasaagcgctggctgccacctgctccca

SEQ ID NO: 4636 - DNA, 51 bp, Homo sapiens
acattcagggaagtatgacctcaccraacaataaacaagtcaccagtgact

SEQ ID NO: 4637 - DNA, 51 bp, Homo sapiens
aaaactatcactaggttgtgattaartccagattactgtttgaagagaaac

SEQ ID NO: 4638 - DNA, 51 bp, Homo sapiens
caatgttacaagctcaagcatggtawatgaatttaggacagctccaaggag

SEQ ID NO: 4639 - DNA, 51 bp, Homo sapiens
aaacgaatctagatctctcttccaayggtcaaaattagaaaggggagaggg

SEQ ID NO: 4640 - DNA, 51 bp, Homo sapiens
gaggttttacatagcactgagacacsagggaaatccttttaacctttagat

SEQ ID NO: 4641 - DNA, 51 bp, Homo sapiens
gcacttcatcttggtaaggagcacartggagcgtccagacagccagaggtt

SEQ ID NO: 4642 - DNA, 51 bp, Homo sapiens
gcttgtgtttgctataaagtgaagcrcgataaagaggtacttactgttggg

SEQ ID NO: 4643 - DNA, 51 bp, Homo sapiens
ttcctttgaagctgcacacaggttaygaatacaaacgatgatgacaaaatg

SEQ ID NO: 4644 - DNA, 51 bp, Homo sapiens
tttcttgccctagaaccaagagtgaygggacttggaacaggttctatttgt

SEQ ID NO: 4645 - DNA, 51 bp, Homo sapiens
aagaggcacttcagctacccattatyaattaccttctttaggtgatcaata

SEQ ID NO: 4646 - DNA, 51 bp, Homo sapiens
agaaaataacagcaacctatttatayacataagccactttcatacctgcct

SEQ ID NO: 4647 - DNA, 51 bp, Homo sapiens
gaaccaaaaacaattgtttctaaacrctgaagtcaccaccgagactcaaaa

SEQ ID NO: 4648 - DNA, 51 bp, Homo sapiens
cttcatttatgaccatgttgtatgcrctctcatgtttcagaccaccagatg

SEQ ID NO: 4649 - DNA, 51 bp, Homo sapiens
ccagaagaaatcaatgccaaggagartctaatgcactgactatgtgcaaag

SEQ ID NO: 4650 - DNA, 51 bp, Homo sapiens
agcaagatttaacagaagtttaatawcacaatagactgaagataaatggtt

SEQ ID NO: 4651 - DNA, 51 bp, Homo sapiens
atgggaggtattgactccagcaaaamgattactggtggtccatggaacatc

SEQ ID NO: 4652 - DNA, 51 bp, Homo sapiens
gcttggactttggtaacgcagtatawcctgggcctacaagacaaaaagctt

SEQ ID NO: 4653 - DNA, 51 bp, Homo sapiens
gcgtcacaaaggaactatctcaagcyaccctttaattgtcacacccatcca

SEQ ID NO: 4654 - DNA, 51 bp, Homo sapiens
agaatccttgttctgattaattttamatgcaaatattcatgttaagagatt

SEQ ID NO: 4655 - DNA, 51 bp, Homo sapiens
ctatgcttgtcatctgtctattataygatgtcaataacatctagaatgcct

SEQ ID NO: 4656 - DNA, 51 bp, Homo sapiens
cttacatgatcctgggtcctggcaartataaaatcttctgggcaggctgac

SEQ ID NO: 4657 - DNA, 51 bp, Homo sapiens
tatgcctgtttttttatttgtagaaytgaggtaataatatctattgtctag

SEQ ID NO: 4658 - DNA, 51 bp, Homo sapiens
tactagatttataaatagaataataygatttgtaggttgaacttaaaagct

SEQ ID NO: 4659 - DNA, 51 bp, Homo sapiens
agttaaatgatacaagatatgggtaygtgcccaatatagcacatagaacat

SEQ ID NO: 4660 - DNA, 51 bp, Homo sapiens
caccctctacctgaggatctggaaayaggctgcttccctcggcaaacatcc

SEQ ID NO: 4661 - DNA, 51 bp, Homo sapiens
tgtattgactactcaaaaacatttargtgtcttcctgtgtcagatgggaag

SEQ ID NO: 4662 - DNA, 51 bp, Homo sapiens
gcagcaagatataaacatatcaataragggtcaatagtggtaagctgaatt

SEQ ID NO: 4663 - DNA, 51 bp, Homo sapiens
gtgaatgtaatagaagattagaatgsaataggaagccagagcaagaatatt

SEQ ID NO: 4664 - DNA, 51 bp, Homo sapiens
ggattgggaagaacccttactttcaytttgcattttttgaactatgtatca

SEQ ID NO: 4665 - DNA, 51 bp, Homo sapiens
tcccctgtgatgatgaaaataatagwattgaaactctgtaataataaattt

SEQ ID NO: 4666 - DNA, 51 bp, Homo sapiens
cagcctctctgccactgccactttaygggtacctggccttgctgacatcag

SEQ ID NO: 4667 - DNA, 51 bp, Homo sapiens
atcgaggccataataagtatttcacrctagattacataaaataaacctaga

SEQ ID NO: 4668 - DNA, 51 bp, Homo sapiens
tcattagtttccaatcaagtgaattytagccacttattactggttctagag

SEQ ID NO: 4669 - DNA, 51 bp, Homo sapiens
tctagatggatatgcagctcctagckcatgtgaacagagttttagacagtt

SEQ ID NO: 4670 - DNA, 51 bp, Homo sapiens
gagaaagcttccttcatgttgcaaasctgcttgaaagaaagagtaattgtt

SEQ ID NO: 4671 - DNA, 51 bp, Homo sapiens
atggactaggacttctactactgtamtaaataaaagtagtgggaaattaaa

SEQ ID NO: 4672 - DNA, 51 bp, Homo sapiens
gaagaaaggttcgtatcctctattayatggttgtgcttagcatcattggcc

SEQ ID NO: 4673 - DNA, 51 bp, Homo sapiens
tcagaaaactactggaactgtatcargccctctatcatagacccaccacac

SEQ ID NO: 4674 - DNA, 51 bp, Homo sapiens
ttttacatgcttattatttctgtaaytgcatactaacaaagtgtatctaat

SEQ ID NO: 4675 - DNA, 51 bp, Homo sapiens
tgtaatagttaaacggattagaccasagtataccatggctttcttctgcaa

SEQ ID NO: 4676 - DNA, 51 bp, Homo sapiens
aacagcctaaacttacatccagcatraagtttgatcaaccttgtcactctg

SEQ ID NO: 4677 - DNA, 51 bp, Homo sapiens
tagtttggagattgcctgtcataccraagtttaggttcttaagtattttct

SEQ ID NO: 4678 - DNA, 51 bp, Homo sapiens
gactttttcatatggtgactgataaytacccactctcagtccatgttcagt

SEQ ID NO: 4679 - DNA, 51 bp, Homo sapiens
tctacatttttacccaattaattgaktaaaatgatgaagagaatatgatta

SEQ ID NO: 4680 - DNA, 51 bp, Homo sapiens
gattgcttgtggactgtagcactagwcttgtgaatttgaacccgtagctct

SEQ ID NO: 4681 - DNA, 51 bp, Homo sapiens
taatcatcttccattggtattgccasaataaggtttgtcagggcaactgaa

SEQ ID NO: 4682 - DNA, 51 bp, Homo sapiens
ttcaagtaccagctctaccacttatyaatcctatgagttttggaaagtcaa

SEQ ID NO: 4683 - DNA, 51 bp, Homo sapiens
agcctgaatattgtattcggaaggaycatgttatttattaaactgtgtgag

SEQ ID NO: 4684 - DNA, 51 bp, Homo sapiens
tcttaagaatctgccttattacaackggagactctagtaagaagtaaaact

SEQ ID NO: 4685 - DNA, 51 bp, Homo sapiens
gaggttgccgaaagtacacaatagargatagccttttcaaacaaatgattc
